United States Patent Application Publication US 2020/0329713 A1 - sequence listing, part 9

SEQ ID NO: 3 - DNA, 6122757 bp, Bacillus thuringiensis (residues 2,040,920-4,081,838 of 6,122,757)
taagaatgaaattacagtatttaaaggaattgcggaagtgattgaaatagtatcttcatataagattcgaacaggtattgttacttcaaaaacacgccaagagtttatcaatgatttcaagccatttggattacattcatattttgaacactctatttgtgtagaagatacaataaaacataaaccacatccagagccacttgtgacatgtctaaaaagattgaatatagatgcacaagaagcgatatacataggtgattcagtatatgacttacaatgcgcaaaacaagcgggagcaaaatttggtttagccctgtggggagcgaaaacaaggaaaggattcgaggtggctgattatatttttcaaacgcctcatgaaattttaagtttagtaaaaagagatagctaaattggctatctctttaaaaatttataaccaccatttctcctgcggaagcaaaataatatccacatcaaaattttctttaaaccaatcatacatcaatgtctctttcactaaatattcagaggcagagtgtgacacaccaattagagacatattcgtttcttttacataatccataatgagcgagtatttatgtcggccgtaatcattgtcgatatggcagtggatttctcctgtaatatatgcttcagcacctttttcttctgcttccttcattaaagatacaacatcgccacacccagcgataattgcgatttttttaatggaatcatgtcgtttaccttcgaagtctgtgtaaggaatctggaagagttgttttagatgtttttggagtgcttctgttgatgtttcatctatttcacaaataaggccaattggttcttgttctggacctccatatgcaaagtcgtccactacagtagcgtttaatgcttttgcaattgaaatactcgttccatgcgtttgatgaaaatccattggtacatgacatgtatatatagaaagttgtttttcttttattccttgcaaatatttttcaggaattggtatgaaaccgcgacctgatcttccaagcggatcaccacactccattacaaggggatggtgcataaagagtaaatcaccaggtgtggattgtgaaatgaatgtttcaagaatgtcatctgtagggaatacagctaaaaatactttgtttacattttcagatccgtgcatcataaggccgttaaataaatctacaaaatttgcttcgaaaaattgttgccaaggaaatttgataggatcatatatggctgggataaatcgactaaaggcactatcttttccgtatttttcaatttggaataagtgatcgagtgattgctctattttttttaaggctggcatgtttgataatcctccttaagatgattcttgctttatgagttgtttgtattcttcgtagcaaaataagaagcggataggaaacaaataaaacctaggatccagctaatagaaggagaatagggaagtacatgctgtaatagcattccgctagaaatgaagaaactactaaatagacctaataacatgggatatcgttgtagtttgaacacggatagtaaacatcctttctcctgcatgaactactcataaaagctcgattactgaaactttatcacatacattgtatattagtcttaattttctgtatataacttttaagaaaaatgatgatacaatatatgaatgataagagaagagaggatgaagattaacatatgtacgttactgtaacagaagcagcatataaaaagattatggatacgattccaagtgaagcgaaatatataaagttattttacgataatgagggttgcggttgtgtcatgagcggaatcatcgatttagtagctgtagcagagaaagatgagcgcgatgtggatattgaatcaagcacaatgaactttatcgctgatcgtacaaagcttgtatttatggacgataagttaacggttgattggcatgaaggtggaggaacttttcagttgaagagcccaagccagttttataatccaaatatgaagttacacgttcgaatatagtaaaggaaaggtgattccaaaatgtattttggaatcaccttttttattttataagtcgctattattgtcgatttttgttgataagtcgatatattgaaaaaatcgctgatataaatggagttgcgctgatatatttgggaaatcgccgatataaatggagttgcaccgatatattcagaaaatcgccgatataatttcatttaccaaaacgtttcaaaagtaaaaagattttttcacataatgaaatgtacatgtgattgaattttctgtataatcttctttgcggaggggatacgcatgagaagatggggaattgagttgttaattttaagtgttgttattatttgggggattaactatacaattgcgaagtatggacttttagaatttacagcaattgagtttactgcacttcgcatgatggcggcggcaccgcttctgttactccttaccttttttattgaaaagtcggtttatatggagcgaaaggatatacctagattaattatcgttagcattgtaggtattgtactgtatcaaacgttatttatggaaactgtcaaatatacatctgctacaaatgcctctttactcatttctatttcacctatttttacaactgcatttgcgattttcttgaaacaagaaaagttttcttctcgaaagttaatcggttctatgactgcctttgttggtgcagcattagttttagtagcaggacattcgcttactagttctttttatggcaatggaattggacttattacatcaatatgctgggggctttatcctgttttagcaggaccattaattaaaaaatattcagcattacgtgttacagcatggtctgcattagtgggtgcgattccgctattattgttaagtggtccacatgtgtttgtcatgccatttcacattactcacggaatgacactatttgctttactatattctattttctttgtaacagtatttggtctagtaatgtggtatgttggtgttcaaaaaattggggcgtcacatacgatggtatatatgtatataacgccgcttgtagctgttttatttgcagctgtctgggcaaatgaatatgtatcgtttcaacaaatcatcggtggaattatcatttttgtcggtctatggtttgtgaaatcggagaaagtaaaagttcattctattgcaggggaacctatatcaaaataggaaaacagatcacctatgatctgctttcctatttttttatttttggtaagaagatgagaaataagatagcagtaataagtggaattaagtttaaaaatggaatacggaagagtgtaataagaataatacctggaagaagaacaccgaggacagcgtaaaaaatgctatggtttttcgtgtaccaatacaatgaaagtccaataagtgcagggataatgaggtgaatgagagccattaaaaaataaatcattagacgccccctttatttgtgtgcttattacatcatatccgtatgttcatagattgatatcatttttttcataaatggacgaaaaaagtttgaaaaaccgtcacaaaatatgagaatatgatgttttaaatcttgtataatattatttcctaaaaatatttaaacaacataaacatactgtttatgttgtttttaatttgagtgaaatggatgtaaggaatatgaatttgaaagaaattttttgttggatagataaaaattactgaagaggagaacagcatgattagtatgtcattaagatcgtttaaaattcaatcgtattatttactaggttttcttttactaggctggatgttaacgccgttttcagctcattttctaggtgctggaattgggcttattgtaagtatgtattgcgtttggcttttagggagacgaattgagaagcttggagatagtattgtaaagaagacgaaagcaccgacactcggtatgtttaaccgttttgcagctgcaattttgggtgctattattatgtacgaaattgagcaccacatggttatgtgggcatttgcagtagggattttgggtgggtatttcttaattgttgttaatttaggatactatagcatgaaagatgagaaagaactaacaaagagctaaaaaagataaaagacttctttttagatggaatagatgatccagccacggatagaagcggtcagggccttttttagccccatacgatgtgaaacccagtagggatataatgtatatattcgaagctgtaattttataatctaggtcatagatgaagagattagcgtttcactttatataagatatagaaagaagcttacgttttcacgtaagcttcttttttatgtaagtgtgtgtaaccgttaagccgcattgggttttgtcggtgagtacgcgaaactttacggttacacgacacttattcatatgagtaaagggttattccaacagaaagttttaatttaagcgattggaccgcctaagttaataatgtcttcagatacgctgtcgaactttttgaagttagctttgaattcatttgcaagttcgattgcttttgctttgtaagcagctttatcagcccaagtttgttcaggcattaacacttcgtcaggtacacctggtacgtgaagtggaacttcaagaccgaagatgtcatgtttagctgtttcagttttcgcaagttcaccgtttaatgcagcttgaatcattgcacgagtgtaacctaagttcatacgtttaccaacgccgtattcgccaccagtccagccagtgtttactaagaatactttcgcatcgtgtttctcaattttttcaccaagcatttcagcatagcgagatgcatcaagtggtaagaatggtgaaccgaagcaagttgagaatgttgcttgcggagatgtaacaccgcgctctgttcctgctagtttactagtgtaaccacttaagaaatgatacatagcttgttcttttgataacttactgattggaggcaatacgccagatgcatcagcagttaagaaaatgattgtatttgggtgtccagcaacacttggcagtacgatattgtcgatcgcatgcatagggtatgcagcacgagtattttctgttaaagtagtatcgttatagtctgcgatacgcgtttggtcattaatgataacgttttctaaaacagatccaaatgtgattgcatcgaaaatttgtggttctttctcgtgagaaaggtttacacatttcgcgtagcaaccgccttcaatattgaatacaccgttatcagaccaaccgtgctcatcatcaccaattaatttacggtttggatcagcagataatgttgttttacctgttccagataaaccgaagaataatgctacatcgccttcttcacctacgtttgcagaacagtgcatagaaagaatatcttgttcaggtaataagaagttcataatagagaagattgattttttcatttctccagcgtattctgtaccaccaattaatacgatgcgtttttcgaatgaaaccataatgaatgcttcagagtttgtaccgtcaacagctggatcagctttgaaattcggtgcagaaacaattgtgaactctgattcatgagtcgttaattcttcttcagttggacgaatgaataattgatgtacaaataaattgtgccatgcatattcgttaataacttgaattggtaggcggtaattgcggtcagcgcctgcaaatcctttgaagacgaataactcttctttttcttttaagtattctaaaactttagtatataatttattaaaatgttcttcagaaatcggttggttcacagctccccaagcaattttgtcagcaaccgatgcttctttcacaataaatttatctttaggagaacgtcctgtatattttcctgttgaagcagaaacggcaccagtagaagttaatttcccttcatttcgcattaatactttttccactaattgcggaacacttagttgaatctgtgcattgcttccgttcaataattcgtgtaaaccaatttggacattcacagtactcatatttatataccatccttttcatttaatgaaatatttctcgtaatccccaacaagagtataacacaattatataaataatgtatactatttatttctttttgtttgtgtgaatgcattatttccttattaatatttcatttcaggcgtattgagaaaaactttcaggaaaatgtgaatattaattgacaaatgaatatcatttctttagtataggttgggacggatactctcttatcccgagctggcggagggacaggcccgatgaagcccagcaacctcacttgtattgataaatgcaggtgaataggtgctaaaacctgtgcgaggctacaggtctcgaacgataagagcgaagggcaaaaagcagtatgcaagtagcaaattaaacctttcctctatgtaaagtaggaaaggtttttctgtatgcttgtgtgggagaataaatgtatgtcgcagtttgtggcaaattaaggatgagttccgtacaatatatacaattactgtagggaggtttaccacatgacaaaaaaacgtcatctgttcacatctgagtctgtaactgaaggacatccagataaaatttgtgaccaaatttctgattcaattttagatgcgatcttatcaaaagacgcaaatgcacgtgtagcttgtgaaacaactgtaacaactggtttagtattggtagcgggggaaattacgacttctacttacgtagatattccgaaaatcgttcgtgaaacaattcaaggcattggttacacacgcgcaaaatacggattcgatgcagaaacttgtgctgttttaacatctatcgatgagcagtctgctgacatcgctatgggtgttgaccaagcgctagaagcacgcgaaggtcaaatgactgacgctgagattgaggcaattggtgcaggagaccaaggtttaatgtttggttttgcatgtaatgaaacacaagaattaatgccacttccaatctcgcttgctcacaaattagctcgccgtttaactgaagtacgtaaagatgatacattatcatacttacgtccagatggaaaaacgcaagttacagttgagtatgatgaaaatggtaaaccagtacgtgttgatactatcgtaatttctacacaacatcatccagatgttacatgggaagaaatcgatcgcgacttaaaagagcacgtaattaaagctgtagtaccagcagaattaatggatggagaaacgaaattcttcattaatccaactggccgcttcgtaattggtggaccacaaggtgatgctggtttaacaggacgtaaaatcatcgttgatacttacggtggatacgctcgccacggtggcggtgcattctctggtaaagatgcaacgaaagttgaccgttctgcagcatatgcagctcgttatgttgcgaaaaacatcgtagcagctggtcttgctgaaaaagcagaagtacaacttgcatacgcaatcggtgtagcacaaccagtatcaatttcagttgatacattcggcactggtaaagtatctgaagacgtactagtagaactagttcgtaacaacttcgatcttcgcccggctggtattattaaaatgttagacttacgtcgcccaatttacaaacaaacagcagcttacggccacttcggacgtactgatgtagatctatcatgggaacgtacagacaaagctgcagctttaaaagagcaagctggtctataatatatgaaaaaaagctttgcgcggtgagcgcaaagctttttttatttataattacgttggaataaagcgaagagttcaatgtcatgccaagtgccgttgcggaatatagcttctttacaagttccttcatgttgaaaaccaagtgatttatataatttaactgctctatcgttaaaagaaaatactcgtaaagaaaggcgatgtaaatttaattctaaaaatgcataatccaataatagggttaaagcttcctgcccataaccttgcccccagtaatcctttttaccaatatcaataatgcattcagcgtttcgattatacgaatcaatatgaattaaagaagtaataccaattggaagatgcgtagctttttcttcaatgatataggtcttagagttcgaagaatgaataaattgccggcaaagtttttctgtgtcttgaaaggaatatttatcaagagtgagtgtagttgaactcataacgtctatatcattatgccatttataatatgttagaatatcatcttcggaaaactttcgtaactggatacggttggattcaaacaatgtaaacaccccttttgtatttactggtttttgttcattatctcaacacacgaactacaataaatttgtccttctaattcaatatactttttcatattcgtcatgtcattcgccggaaagggcatatgaatccacgctttttcatacgtttgtatttctgttttacatgatttacaaaagattgatttctttttgaacatatgtgatcaacctttcatttgacgtgctttacttgcgcaaaaggcactacttagtaaaaatagtgtcgcgaatataatgcttactaatgtagcgtatggaattgcgccttttaaggaaaagccgacagtgattgaagcgatgaataagaggataaatgttgttgttaattttttataaagttccatacaatgtagacctccaatttattttttagtacaagttttaaaattgaattctattatgtagaaaatataaagagtagctaaagatgtgtagtctaggagtataagaaagtacactttcctttttgtgggttagtatacttatattgtatcatggcgcatgattggcttcatacataattgtgtaaaggtatgtatgataaaatgaagaaaagtctttaagaaaggaaagataaaaaatgagtgtaactgaacataaaaaacaagctccaaaagaagtgcgttgcaagattgttacaatttccgatacacgtacggaagaaacagataagagcggacaactattacatgaattgttaaaagaagcgggacataaagtaacttcttatgaaattgtaaaagatgataaagaaagtattcagcaagcggtgttagctggttatcataaggaagatgtagatgttgtattaacaaatggcggtactggtattacgaaacgcgatgtcacaattgaagcagtatcagcgttattagataaagaaattgttggatttggtgagctgttccgtatgattagttatttagaagatatcggaagcagcgcaatgttaagtagagcgattggtggtacaattgggcgcaaagtagtcttctcgatgccagggtctagcggagcggttcgacttgcgatgaataaattaattttaccggaattaggccatattacatttgagctgcatcgccaatgagtaagtatgctggaattgtattagcgggcggtatgtcgagtagatttggtgagccgaaggcgttagcaatttggaagggaactacttttgttgagcatattgtgaaagtgatgggaactactttgcaagacattgtagtaattagccatactgatataaaagagcgagtagagcaattcgtacaagttcctgttatagaagacattccgcactataaaggaaatggaccgcttgcgggcattgtatcaggtatggaatacatagaagcagattggtacgctattatgccttgcgatgcaccaaacgtttcgcatcaatggtttgccattttactagagcaaacgagcaatgaatatgatgcggttgtacctattattaatggaagaaaacaaccgctacttgcggcgtatcataaccgcgtgaaagaaaagatttatgctttacttcaggaagaaaaaagaagtatgggccagcttttatcacaatgtaatgtgaagtatgtttctggagaagatgtacaagcgaatgcggattggtttataaatgtaaatacgaaagaagaatatgtgcaggctcaaaaagacctttcaaatgaatgaaaggttttttgatatacagaattggggaacaattactgtataaaggtatgtgagtaagttgattttaaggggaattcttaaaatcattatacagtttaaaatactgtataaccatatattaatttttatgggtttttattacaagtctgtttagttatgtttatttttgatataattaatatagaaataaaacaatgtttaaccttatgtatcatttattaaactaaaatttatgaccatgtaataaactcccttcgtttttttgaagggagtttttctatttaagcaagcaactctgatgcgttatgctgcaggacttcttcataatggttaagcaaaccgcgaaagatctcatcccagctctttgatttcgcaaaagatgaagctgatattcccatctgctcaagtttttcttcattttgtaataaaaaataaatggatgatagaaatgcatcttcatttttaggcggacaaagaactcccgtttttccatctgtaataatatttttaaccccgccactatttgcaccaatgacaggtgtaccgcatgcgagtgattcaagtacgacatttccgaatgtttcagtagctgatggaaacaccattatgttagaacaagcatatgcttcagctaaatctgcactttgtaaatagccagtaaaagtgatatttgttttcggaacagcttcacgtaaacttgttgctagaggaccgtctcctgcaatgagccaatgaatatcgtttcgagtatgtgctgttttaacgataaggtgttgcagcgtatcaatatctttttcaggagcaattcgtccaacataggaaaggacatacttcgctgtaatattatatttttttcggaataggtctgtattgtaagcaggatgaaagagtgtgcaatctacaccacgtccccatatagagagggtctgaaagcctttgttttttaattgatgtaatgtttcaaaggaaggtacaaaatttttttgcatatgactatgaaaccattttaaatagttccacagcatattggagaggaattcgattttgtaataacgtaaataggcatcgaaatcagtatgataagaaccgacaactgggatgtttaacttttttgcataatacaatccacaaagtcccatgttgaaaggtgtggcaatgtgaataatgtcaggtttaaaggaaagtagttcccgtttaatgcgcggagtaggaaaagaaaaacgacattctggatataatattgttaacgggatacttctcatcttattcacattcgctacaaaattatcttcagctgtatgctgaggggcgaaaacagaataggcgatctgttctttctgaaaatattgtgttaatcgctctaacgttttcgcaaccccgttaacttgtggcgtaaaagtatcggtaaaaatggcgactctcatcatatcactcctttatgtgaaaagtgggatgaattgataaaaagagatgatgccagaacaagtgccaaggcacataccgacgaatacatctgacggatagtgaaggcctaaataaatacgtgaaataccgacgcataacgctaacggtaataggaaagcaagtaagcttggattatagcaaataaatggaatgaagacagagaaaacggctgttgtatgaccagacgggaaagagtggtcttttaatggatggactggatattttgcatcctgaattgttaaataaggacgttttcgcggataccacctttttaatatttgcacaggaatatggctaattgctaacgaaatagcagttgcaattgcagcttgatgcaaagttccctttgcgaaaattaaaaagaaaagtgtgagtccgatggagaaagtcgcgccaccgatatgagtaatattgctgaaaaagatatttaatgttttttgatcaaagtagcggttaattcctctgaaaatgtaacattctattttatataatccactgaccttcatgaaaattctcctccctcatctacatatatatggagatattagcttttattttaataagattttgttgagggagtaataatgttttgtaaagaaaaagttagattttatataaaaaaagctgccaatcttatggcagcggaaatttacttctgtaatgatttataatattgacctttttcaacgtattgcgtgcgaatacgctccatatctttacggtcttcttctgttaattcacgaatgactttcgcgggacgaccgaaagctaacgtgttcggcggaattttctttccttgtgaaacgaggcttccagcgccgataaaagctccttcgccaatttcagcaccatctaatataatagatcccattccaattaaagcatctttcttaatatggcaactatgtaaaatgacttgatgcccaattgttacgtcgttttctaaaataagaggatactgcgggctttggtgaagtgtacattggtcttgtacatttactcggtctccaatgattgtcggtgacacatcaccacggatgactgtattaaaccaaatacttgattcctcgccaacggaaacatcgcctgtaatcgtaacatagtcagcgataaaagcactactcgcaattttcggttttttttctttgtaaggatatatcatgtaaagtcttcctttcctagagactagttttagtgtatcaaattatgagaaagagtgaaatggaggagagccgtatgtggaattatgaagcggaggaagcaaaagctgtcattgttattgtgcacggcgcaatggaatatcacggacgttacgaagccgttgcggaaatgtggaatcatatcggctaccacgtcgtgatgggggatcttccgtcacatggaacgacttcaagaaatagaggacatattgattcatttgatgaatacatagaggaagttaaattatgggtgaaagaagcaagaaagtataggttacctatttttctattcggtcatagtatgggtggtcttattgtcattcgtatgatgcaagaaacgaagagagaagatgtagagggtattattttgagttcgccttgtttaggggtagtgactggaccctctgctccgcttcaatttgcttcaagaatattaaatgttgtggctccaaaattgcaatttgcaacgaatcttacggtggaaatgtcaacacgtaaccatgaagtgagagatgcaatggagaatgattctttgttcttgcgcaaagtatcagtacgttggtatagtgaattgattaagtctatcgaaattgctcataaaaaaatagatgattttccagatgttccgctcttgctaatgcaagcttgtgaggataaacttgtagataaaatacgtgtccgcacttggtttgataatgttaaaataagtgataaggcttttaaagaatggccgaattgttatcacgagctattaaatgagtatgagcgtgatgaaattttgagttatattcagtcatttactgaaatgcatgtcaataatatagtaaaaacaaacaaataaatcattatttgtacatttaatagaggagatgaaggaagaagtgaacgtaccgagtaatcccataacgctcatggcgaaagtataccgtgatgtgtttccggttgtacaccatgagctagcgatgtggaaagagcgtgcctaccatattccgaatgatgagcttcatagtcaggcaatcgcaagtattgagcataaaacgtttcattgtgagggcggtggcattttagctctgctagcaaatgaacaccgagaagaatgtattcgttttatcgtagcgtatcaaacgatcagcgactatttagataatttatgtgatcgcagtacatcacttgatccaaatgattttgccgcactgcatgaatcgatgttaatggcattatcacctgaagtagaaggtggcggtaattattatcgttatcgtgatgatcaagatgatggtggttatttagatgaacttgttgaaacatgccaagatgttttaaagaaaacgaagcactatgacaaaattgctcctgttcttcatgaacttgcttgttattattgtgatttgcaaattcataaacacgtgaaattagaagaaagagagccgcgactgaaaaattggtttgaagcacataaagaaaacttacctgagatgagttggtttgaattttcagcatgtgccggttctacacttggaattttctgtcttgttgcatatgcatttcatgatgaattacatgatgaagatattgcgaaaattagacaaggatacttcccttacgtacaaggacttcatattttgcttgattatttcattgatcaagaagaagaccgtataggcggagatttgaatttctgtagttattacgaaaacgagcaagcgatattagatcggatgaaacactttgtagaagaagcagagaagagcattggtgatttgcctcatgcgaagtttcatcgtctcataagcagagggttacttggtatttatttatcagatcaaaaagtatcagcacaaaagaatatgcacaaaatggcacggcgcattgtaaagtacggaggcctcacttcacgattcttctattggaacgggaagatgtaccgaaagaaaacagcgcagtgatgaagaaaaccactaatttagttaaagacactcttatgagtgtcttttttgttattttgaaaatggcgtattttatcagtatacagaaaataaaaagggtccacgatctgttgtatatagtaggtggtgggctttttcagtagcctcatcttaagtaggaacactttttttcacctatcatacaataacccagaaaataacttgctgttttttgtgaaaaggagtatgacaattatgactatagtagctttaattaccattttattactttcgttatcttctagtatagataattttggagtagggctatcttatgggattcgtaatattcgaataggttttttagctaactttataattgcaattattgcttttatttttagtgaaatgggtattttgtttgggcaatatatttcaaaagtttttccaggtacattatctgacgttattggtacattgtttttgtttgtaattggtttacgaattattttaatgacaattccacaaaaaaagaaggctaatcaagaagtacttgatgaagatgaatctgtttcgaatgttattactggatatttaaaatctcctgaaaaagctgaccttgatagatcagggaatattagtttttttgaatctattgttcttggtattgctatatcgatgaatgctctaacgaatggactaggtgcaggtttattaaaattatctccatttgctatttcattatcagcagctgtattcagttttttcactgtttggttaggagttaaattaggaaaaaaagttgcaaatgtaaaaattggatcttggacattaggacaatttagcacagctttaagtggatttatattattattaatcgctgtacacaatttgttttaagtacaaattgtggtgaatacattggggggatttaattttaatggtgggaagtgtgttattggctggaaagataaaaaagttattaataaaaaagaaaatgccattgaagatagataagtgatctagagagaaataaaaagcatttgtacaacgcgtgtacaaatgctttttattatgatcgtatttttgaaaatacatatataagaagttcaatcgcaaaaatcactaatacagatagtccgaataaaggcatggcagcgcctagtataaccatcatgataaagaaaacgattatgcttttcttatctctttgctttggtggtgctgctaattttcctttcggctttcttgctaaccacatttttactccgtaataaataagaagtagtagagataatgtcgttagtaagcataatattttatttggccatccgaataaatgtccttcatgaagcgggatgccgtaagtgaaccattgtgcaagtaatccataatcacgatagtccgtttttgaaatgaattccccgctatattgatcaaagtaagctgttatctcttcatttggtgcaacatgcatacctgtaataccagaaccgctcgatttcgaaacggtgaatacaccttttggatcagctggtagtgaaataacatatggcttctttatttcaattcctttttgtaattcatcgacagaaattgctttcggttcatttgaattcgattcaggcggagcttcttttcttgttgcccacggcaattcttttacctttgattcaggcggcgccatatacaatttcggatatccgagcgattcattcgacgacgcaattttataaatttggttacccataaatcctgaccatggcaatccagatgcgactagcagaacgagtggaattgtaaatataataccgataatagaatgacgtcgttttgctttttctcgcttattggatgccggtttgtttttgaactggcgtatactcatgtacaacccagtcacgattaaaaagatagtccagcatgccgcaagttctacagtatagttgacgacagtgccaccaactaaaagagaactatgtaattccctcattatattggcaaacgtttcacttgcattttgatccccaacaatttgattattactatctaaatacacatatttttgttgtccagtatactcatttgcaatggtaagtctcgtattataatccccattaaactcactaattttcgccacactataatgtggatattttttctctgttaacgaaatagaatcagccatcgaaatagattctgtttgagcgctcttcccaaaatataaatctttatagatgaaatcttcaacttcctctcgaaataaatacccaattccgctcagtgacaacgtaataagaagtggcgtaataaaaagcccagcataaaaatgccaacgccaaaaaatgtaatgaagcgaacgatttactttcatactttcagttcccctaaccttccctatatgaataactacttatttaatatagcgagattaagtgtgattactttgaaagaattgtgaagaaagttaaaagtttgtgggatttttattaaacataaaacacattttagaaggagtgttttctatgtttatgaagatctctttatatttgataagtacatcctaacaaccgctttcgcaagacattgagaagaatcaacaaaatcctcactagccacaacattcaaatcagtacatgcgataattgcggtatctacttcatccttcaactgcacaatgagcgcgctccataatttgcgagcttcttcaacttctccgcttttaatatacataataatttgattaatcatcgtttgccatttttcataatgaatgtattctatattccgttttgcaatcccgtcttgataaataccagcttgaactgtcgcttccgttgcaagaagagcgactctttttgcagtttcaggaattgcttgtaacgtttcgtcaactatatttaaaatcgggatagaaagagaacgctgtaattcttcaaaataaagatgcgccgtattgcacggcatagcgataaagcttgcgccagtactttcaagtttttgtgctccttcaataatcgcttttttcatcgcttcgtgatcaatagggcgatccatgtaaaacggtgttgggcacgaataaatcatcatatgaggaaagtccatatcatgctttgctccgtatattgtttggcaccctgctacaactgtatcgacgaatggtccagttgattttggccccattcctgctagtattccgatcattgtctcgtctcctttaagaatgtttatatccattatataggagaataacaaaaagacgtgcagtgagtgcacgtctttttttgttatgttttgtcgaatcgtcgatatatccgagaaatcgttgatatattgtaagttatgatagatatatcgaaaaaatcgtttatatatcccgagttacgatagatataattgaaaaatcgttgatatattaccccgcattaacgggcagtaaaactcccaccttaaaattcgcctggagcaaagaagttagttgggaaataaactgcccataaatgcccgattggttcaactaataatcagtggggattccccccactgattaaagtttcactttatcgtttctcaatcgccacaataaatggcgggttgttttgttggttaatgaagccatatcgcagtacgtgagcttgtttttggtctagctcttctgcaaatttgagaacagcgtcgcgttctacttgtccttctgggtgtccgtggtaagtgacgaggacgatgataccttcaggtgccattacttctagtaattgttcaattgccgaaattgttgagttcggttttgtaacgatatgcttgtcaccgccaggaaggtaacctaagttgaagatagcgcctgttacttttccttttgcgtcttctggtagtacggatagaagtgtatcgtgactatcgtgaactaaaacagtacgttcaaaaagttctttttcttttagacgagttgttgagctttcaatcgcttctttttgaatatcaaatccaaatacttttccgctatccccaacaatttcagctaggaagcaagtgtcatgaccatttccaagtgttgcatctacagcgtagtcgccttctttaacagccgtttgcagcagtgtgcgagcaaacggtaatacacgttctaatttcattgttgtttctcctcatttgcatattttccttgccagcttccgcggcgtacaaattctgcatcgatggaatttaatacttcccatttatttaagctccacattggaccaatcattaaatcaggtgggccgtcacctgtgatacggtgcacaattacgtcttctggaataatttcaagttggtcaacaacaagacttacgtaatcctcaagagaaaggaattcgagttgtcctttttcatattgcttcaccattggcgttccttttaataagtgaagtaagtggattttaattccttgtacatcaagtttcgctacttcacgagctgtttccatcatcatgtcgtaatcttcaagtggaagaccgttaataatatgagagcaaactctaatgccgtgcttacgtaatttatttacgccttccacgtaagacggataatcgtgagcgcgattaataaggtttgcagtgcgttcatgaacggtttgtagtccaagttcaacccaaagatacgtacgtttatttaagtccgctaaatattcaacgacatcgtctggtaaacaatctggacgagttgcgatagaaagaccgacaacatctttttctgctagaagcggttcgaatttttcttttaacacttcaagtggtgcgtgtgtatttgtgtacgcttggaaataagcgatacattttccatctttccactttgagcgcattttttctttcatttcatgatattgtgttataacatcatcgcggcgatcaccagcgaagtcgccagatccggcagcgctgcaaaatgtacaaccaccgtaagcaactgtaccatcacggttcggacaatcgaagccagcatctaatgaaactttaaagattttttcaccaaattcatttcgtaaatggtaattccatgtatgataacgtttattgtcgtttgtatatggaaaagggttttgaaccttcattattttccctcctaagccgagtcaaaatgaaacaaaatccattataacatactcataaggtagagatggaagggacacactaaaggggaattgaagcaaggagggacaattatggcagagcgtcaatcacttgaatcgtatattacacaagcggaacaagcggtggaatatgcaaaagaacaattagaacaaggcatgagacaagagcattacaatacgatggagtattcagatgcacagttacaattagaacaagcgtataacgatttacaaacgatgcaacaacatgcgaatgatgagcaacgtgagcaattaaatagagcacgtatggcaattcgccaattgcaacatcaaatgattattacaccgcactaataaggagtgaatgtaatggcgaaacgttcagatcaaaataacccagagcaaaaaacacaaaatggacataacgctgagttttcgaatgaacttgatcccattgttcaagtaaaacagcgtaatagtaaaaaaggacaacctcaaaaatcaaaacaatcagagtaaaccaggtcgaaatatgacctggttttattttgctatatgacaatagtgtaagatttctgtaaggtttgccgatagttgtaattgtccttttccagtagagtaagggaggattaaattttggacaaggagctgctttatggggaacaatattacaaacaaacgaattgatgagttagattacattcgtggcttcgcattactggggattattttagtaaatattttagcactacttaatattaaaactccagatcctaatacagtagatgctagctatcaaaggtttctatacttatttgtagaaggtcgtttcttctcgattttctcattcttatttggagtgggattctatatcttcattacaagagcgattgcgaaagggaaaaatggatatgttctatttttccgccgcgtagttgcattatttatttttggtttaattcatcaaatgtttcagcctggagaagcactagcgttatacgcaatttgtgggttaatcgttttgccgttttataaagcgaaaaaagaagtgaacctagcactaggacttattttgacaattgccttcagtgtaatgggagttaaagaactattaccacttggcttaattttattaggacttgctgcaggacaatatcgtgtatttgaaaatctttcaaaaaacataaagcaagtcgctatttttacaggcattatgtttgttttaagtgtggcagctgtatggtatcaatatggacacgtgcctgctggcccatttgtaaatatgatattgatgaatgaagatggaacaatggatgctgcaagccagtttctaaaaattggtattaatgttggaccaattatttcagctttctatgtaggagcattaattttattacttcagttaaaaccagttcaaacattattagcaccattgaaatactacggtcgtatggctttaacaaattatatcggacaaacggcaatgattttaattgctggtagtgtatttaactttgcaggtaacttaacatacatgcagacgctatatgtatgtatcgcaatttatgcaattcaaattgtgtttagtgtaatttggatgaaaatctttaaaatgggtccattagaatgggtttggcgtgttattacgtactggacggtaacacctttaaagaaataaagtgaaactttaatcagtgggctgttcctttcgcggaacagcctatttttattgtcatcttttgtcgataagtcgatatattttggtaatcgctgataaaagtgtaagaatcgccgatatatttgaaaaatcgctgataaaagtgtaagaaccgctgatatattttaacaatcgccgatataatttcatttaccgatttactatgtcgaaatgtgaactagtatgaaaagccaaccttacacgcatccattttctatcttacaaaagtgtaaggtaattgtaatgttaacaaatagcagttcacttctaaaaagcgcaaaataggtaatggaaaaacaagcgtaggaggatatatatgacgaaaccagttgtagacgtgaaaaacgttcaaaaagtgtacggtaaaaaaggtgagaaccaatcacacgcgttaaaaggtgtatcattctcaattcaagagggtgagtttgttggaattatgggaccatctggttctggtaaaacgacattattaaatgtaatttcaacgttagataaggcaacgggcggcgttgttgaaattgcgggaacggatattacaaaaatgaagcaaggtgagctttcagatttccgttcgcaaaaattaggatttatcttccaagattttaacttattagagaacttatctatttatgaaaacattgcacttccactttctcttcaaggtgtcgcatcacgtaacattggaccaaaagtcgagaaagtagcggatatgttaggaattacagaaatacttcaaaagtacccatctgaagtatctggtgggcaaaagcaacgttcggcagcagcgcgtgctttagtgcatgagccggcaattattttaggggacgagccaacaggagcgcttgattctaaaaatgcaacgagtttacttgatgcgatgacaaacttaaataaagatcaaggcgtatcgattatgatggttacgcatgatccatatagcgcaagttactgtcagcgtattttattcattcaagatggtgagctatataaagaaattcatcgcggtggtacgcgtgaagagttctacaaagaaattttagatgtacttgcagatttaggtacacaaaaggcgtaagaaaggaggttccagtatgttatttaaactttccatgtcggggctgaaaagtaagctgaaagattatatcgtcttacttgtcggtcttgtcatgtcgatttcaattttttacatgttccaaacgttagcactgaataaagcatttttagaatctaattcagtgattaaatctattggattcgtattccaagcaggatcatttttattagcaattataacgttcttctacattttatatgcaaactctttcttattatctcttcgtcaaaaagagttcggtatgtatatgatgttaggtgcgaaaaaacataaagttacattacttatgtttattgaaacaatcgtattaggtgctgcgtctcttgcaattgggattgcagttggagtaggacttgcagaaggtattggacagttattaatgaaacagcttgaatttgctggtgaagggtataaagcattttatctaccatctatgactgttacttgcatcttcttctttgcactatttgtattatcagcaattatgaacagtattaaattgtcacgtatttctgtattgcaactagtacatgcagatgcacaaacagagcgtgttgcagtaaaaggtaaaaagacagttgtagtggcattccttgctgttattttattaggtataggttatgcatctatgatctatatggaaaaactaaaagagatgggaatccttattgcattaattacaacgacagctggtacttacatgctatttggctcacttcttccagtcattattaaaaagttaaaaagtaataaaaagcgtagtgaaaaaggacttaatgcttttacatttgcacaattaaacttccgaattaatagtttaacaaaagtacttgcaacagtggcaatgttagttgcacttggagctggtgcaatttcgggcggtatggcgttcaaaaataacgttataaaaatggtagatggtttagtaatatatgattcagtagttcataatccaacagctgaagaaaagaaaattttagatggtattacatttaaagagaaaagcgaatatcgttataaagttgatgataaatacgtttactatgtaaaagaagatttagagaaaaatcgtcctttcgtaaaagatatggcaaagatgaagtctatgaaggatttagtaaatacgaaaaaagtttcagaggaactaccggtaggtgcagtttctagagagatgaatcaaaaagatgcgaatactaaagaactttcagcggaatggacagatgcttttagtacaatccatccatattatttatacaatgatcatgcaattaaaattgtagatcaaaaaatgtacgatgggataaatggtaaagaaggtatagcatttatcggaaaaacagatgattttttaacatataaaaaagaatggaaaaaacttgacgagttgcagctagataaatataaaaatgtaaaagttgaacaaatggatagtaaatatcaagcttatagtgggttctatggcattgcgagtggaacagtatttatggggttcttccttggaattgcgttcttagcaatgatggcaagctgccttatgtttaaaattctttctggtgcatcaaaagatattacgcgttatcaaatgctgcgtaaaatcggtgtgcgccgtgagttactaacgaaatcgatttataaagagctattcttagtattcttattcccagcaattgtgggtatcgctcacgtattagttggtatgaatattttcggatttattttaatcgatccgtacttccgtatttgggtaccaattgtaattttcgtagttatttatgcgatttattacttcattacagttcaattgtataaaggaattgttcttccgaaagaagattaataataaaaaccgagcaaaaacgctcggtttttattattttcagaaaaaatactttaatgttactgaaatgtataatataatgtaagtaagtaacgtaatataaaagtagaagtagctgtataaggaaaggaggaatccaatctgtagaaagaagctgaacttttatccccacatttttttaccgcaacgtatttatacaatcgtaagtttccacattgaaagttttcagaaccacctgagtatattgtgaaaataatggataacacatggaaatctcatagcatgataaggtaaaatggacaacataatgagaaaattaccgttcataagatgaggagaatacatgtatggaagttgtagaggcattaaaagatataagccaaattgaggctatgaaaaaatatttaaaagagcactcccagcgagattatcttttatttgttattggaattaacacaggattaaaaattacagaactacttagcatgaaatttgaagatgtattaaatgaagacgggactgttaaagagttttatgctcttcctgtgaaagatgaaaaatttaaacaagatatttatttaaatacaaaagtaaaagaagcgcttttagattacgtacaatctattggcgttaaaagagaaaattacgtatttcaatctaataaaacgccaaattcaattacgcgccaacaagcgtatcgtgtaattcataatgctgcagaagcagttggagttgttggtaaaatcggaacgaattcaatgcgaaaaacgttcggatttcatgcgtacaaaagagggatagcgattgcgctattgcaaaaacattttcatcacgcgactccatcagagacactaaagtatttaggtatctcaaaggatgagagctttaaaacggagattgatgtcgatttataaaagccgtaactaaaaaattaggaggcggaaaatatgaatattagagagagtgaactgccgggtattggatgtaagtttgaagtgattacaaaaggtaatgaaaagatggttatcgttattcatgatgatggccgaagagaaatgtaccattttgatgctgatcatgaagagagtatttcaagcgtctctcttcgtgattctgaagcgagacaaattgcagctatattgggcggaatggtatataggccacaagctttagatacgattgaaatggcttttgagggattatcaattgagtggtttaaggtggaaaataatgcaccagttgtacaaaaaacaattggtagtttacatgttcgaaacacatataacgtaacgattattgccattttgaaaaagaatatgaagaagttctttaatccaggcccagattctatcattgaagctggcgatatgctcgtattatcaggtgaaagacatgaagtgaaaagaattattaatgagttgctttcagtaggaggggattcataatcgatggatactttaatctttgaagttggaactgcgttagtattagtcgcttttgcagctattctcgctgcaaagttaaagttctcgattattccgtttcttattatactcggtatgctagtggggcctcatgccccagatttagggcttatcgatttaagatttattgaaagtggagaagttatttccttcctcggccgtgttggcgtcatattcctcctattttacttaggtttagaattctcaattaaaaaattaattaaatcaggaaaatcaattgcttttgggggaactgttcatatatcgcttaattttatattaggtttactttacggatatataatgggtttccccttattagaaacattaattattgctgggatcataacaatttcatcgagtgcaattgttgcgaaagtaattgttgatttaagaagatctggtaataaagagacggagctaattttaggaatcattatgtttgatgatatctttttagcggtatatttatcagtcgtttcaggattagtacttggaggggcaacatcatttgtaggtgctcttacatctattttaatcgcagtaggttatatgctactattctttgtagttgctaggaaagctacacggtttttaaataaaatgttagatatttcgtccaatgaaatttttattattgtaatattcgctattttgttctttgtagcaggattttcagaaacgattcatgttgcagaggcaattggagcattattactaggactcgttttttctgaaacagagcatagtgatcgaattgaacagcttgtcgttccgtttcgtgatttctttggagctatattctttttcagcttcggtttaagtatagacccattttcacttggcggagcagtgtggttggcattaggagcagttttcattactcttatcggtaattttactgctggaatggttgcggggcgtaaagctgggttatcgcataaggcttctacgaatatcggtttaacacttgtatcacgcggagaattttctattatcgtcgcgaatattggaattgcgggtggcttaatggcagcgattaaaccgttctcagctttgtatgttttaatattagcatcgttaggacctttgttaacgaaagaatctgggagaatatactcgctactagataaggtgtttaaatggagtgctaaagaacgtgtgaagcgagaaaaggaagttggatagtacaaataagggtagactgcatgaaaatttcatgcagtctacccttttatatattgttactgttgtcgttttttgtcggtaagtcgatatattttaataatcgctgatatatttgtagttgcgccgatatattctgataatcgctgatataatccaagaagcaaccaatataaattcatttaccgacgaactattatctgaatttcatcaactattaatcagttgccttcctatttaaaaacgactacaattttactgttatatatatgaacgaaaaaaatagaataggaggggaagctatgccaaggaaagtatggctattagtagctgggatgattattaatgtcacgggtgcttcttttttatggccttttaatacaatttatttacatgatcacttgggaaaatctttatctgtggccggaatggtattaatgatcaactcgcttactggtgtaatcggaaacttgctcggcggtgttttatttgataaatggggcggttataaatcaactttagtagggattgtgattacacttgtatcaattttaggtcttgtgttcttccacggttggccgttatatgttgtatggctagcgttaatcggcttcggttctggaatggtcttcccatcgatgtatgcgatggttggtacggtttggccagaaggcggaagacgggcatttaatgcgatgtacgttggacaaaatgttggtattgcgatcggaacagcatgtggtggattagttgcatcgtatcgttttgattatattttcttagcgaactttattttatactttgttttcttcttaattgcttttattggattccgcggtatggaagacaagaaagagccaggagtgcaaaaagaagtcgaaacgaaaaaagggtggtcacttacacctggatttaaagcacttcttatcgtgtgtgtagcatatgctttatgctgggttacatacgtacagtggcaaggagcgattgcaacacatatgcaagaattgaatattagccttcgtcactatagtttattatggacgataaacggagcgatgattgtttgtgcgcagccacttgttagtatgctaattcgctggatgaagcgttctttaaaacagcaaattatgattggaatcttcatttttgcagcttcattcattgtgttaagtcaagcgcaacaatttacgatgttcctcgttgcgatggtaacattaacaataggtgagttatttgtatggcctgcggttccaacgattgcaaatatacttgcaccaaaagataaattaggtttttatcaaggggttgtaaatagtgcggcgactgtagggaaaatgttcgggccagtcgttggcggagcaattgtggatttatacaatatggaagtattgtttatagcaatcatggtaatgcttgtagtagcgcttatagcaacgagcatttatgataaacgagtaaaagtagaagaaacagttgaagaaaaaattgcagtttagtttgacggaacatgtaacatgttttagaatatatttaaataaaacaacctttagaacaagggagatagctcggctgtcttaagatgaattcgttagttattaagagtaacgattaaccgagaagtcctcgctttaagtaagctcttaagagatactaggtgaaggatagttcacgtaacttatatgtgtaataacagtgagaaggagtagtagtaatagaagctggtttagagagttgacggtcggtgcaagtcaatccacgtttcgttatgaactcgcctttgagttgcagttgtgaaactaatagtagcaattgccgttaatccacgttacggatctaagcgaatgtatatttgtacattaatttagggtggtaccgcgggaatctataacctctcgtccctttttagggatgagaggttttttgtattttgggcggtgaaaataaatagaatttcaaggagggtatctcatgagctttaatcatcaagaaattgagaagaagtggcaagggtactgggaagagaataaaacattccgtacgccagatgagacagaaaaaccaaaattttatgcactagatatgttcccatatccatcaggtgcaggcttacacgtaggacatccagaaggttatacagcgacagatattttatctcgtatgaagcgtatgcaaggatataacgttcttcatccaatgggatgggatgcatttggtcttccagcagagcaatatgcacttgatactggaaacagcccagctgaatttacagagcataatattaatacgttccgtaaccaaattaaatcattaggtttctcttacgattgggaccgtgaagtaaatacaacagatccaaactactataagtggacgcaatggatcttcctaaaactatttgaaaaaggcttagcttacgttgatgaagtacctgtaaactggtgcccagcacttggtacagtacttgcaaacgaagaaatcattgacggtaagagtgagcgtggtggacatccagttgagcgtcgtccgatgagacagtggatgttaaaaattacagcttacggagatcgtctattagaagatctagatgagcttgattggcctgaaagcttaaaagatatgcaacgtaactggatcggtcgttctgaaggtgcagaagtacacttcaacatcgatggtacagacgagaaattcacagttttcacaacacgccctgatacattatttggtgcaacatactgtgtactagctccagaacatgcacttgttgcagaaattacaacagcagaacaaaaagaagcggtagaagcttacattaacgctgtaaaaatgaagagtgatctagagcgtacagaacttgcgaaagaaaaaactggtgtattcactggtgcttacgcaattaacccagtaaacggtgagaaattaccaatctggattgctgactatgttcttgcaacttacggaacaggtgctgtaatggcagttccagctcacgatgagcgtgactatgaattcgcatcagtatttaatcttccaatgaaggaagttgtaaaaggcggagatattacgaaagaagtgtacacaggtgatggtgcacacgtaaactcagcattccttgatggtttaaataaagaagaagcaatcgcaaaaatgattgaatggcttgaagtaacgagcgcaggaaatcaaaaagtaacgtaccgtctacgtgactggttattcagccgtcaacgttactggggtgagccaattccagtaattcactgggaagatggtacaatgacagctgtgaaagaagaggaattaccattagttcttccgaaaacagaaaacatccgtccttcaggtacaggtgaatcaccacttgctaacattgacgagtgggtaaatgttgttgatcctgagactggtaaaaaaggtcgtcgtgaaacaaatacaatgccgcaatgggctggtagctgttggtattacctacgttacatcgatccaaacaatagcgaagcacttgtagatcctgaaaaagtaaaacaatggcttccagttgatatttatatcggtggtgcagagcacgctgtacttcacttactatatgctcgtttctggcataaagtattatacgatatcggtgtagttccaacgaaagaaccgttccaacaattattcaaccaaggtatgattctaggtgaaaacaacgagaaaatgagtaaatcaaaaggtaacgttgtaaaccctgatgatatcgtagcaagccacggtgcagatacacttcgtctatacgaaatgttcatgggaccattagatgcttcaatcgcttggtctgaaaatggtcttgacggagctcgtcgtttcctagaccgcgtatggcgtctattcgttcaagataacggtgaattaagtgagaaaattactgacgcaccaaataaagagcttgaaaaagcttaccatcaaacagtgaagaaagtaacagaagactatgcagagcttcgcttcaacacagcgatttctcaaatgatggtattcatcaatgatgcatacaaagctgaaacacttccaagagaatatgtagaaggtttcgtaaaaatgattgcaccagttgcacctcatatcggggaagagctatggagcaaacttggatacaatgaaacaatcacatatgcaagctggccaacatttgatgagtctaaacttgtagaagatgaagttgaaatcgttgttcaagttatgggtaaagttcgcgcaaaactaacaatgagtaaagacgcatcaaaagaagaaatggaacaacttgcacttgaagcaattcaagaccaaattgaagggaaaacagttcgtaaagtaattgttgttcctggaaaacttgttaacgttgttgcaaactaaatcatttgaaaaagctcagagcgtttatgttctgagcttttttgtatagaaaataatctcagggtcaccttcatctaagttttcaactattccgctacgtataaaaccattcgagttaaatactttctgcatactttcattcgattcgttcgttgaagaaaatattttttgagtaggagaatgacttaacatatatgagattaacgagcttgcatagccttgccttcttttagttggtgaaacaatgattaatgagaggaaagtacaaccaaagaaatttgtatcgtatgttagaaagccagagatagaattttcttctgttacaatgatgcatctgccttcacggatagtgtgcttaatataatttcgtctactatcgtttccaattacgtcaatatctatatggacgattgaatctaaatcattgatagaagcctttgttacattcttcaatataaatacctcctagaaaaaatattcagttaattaattttatcatgaatgaagaaaaagaagcggaattctagtgcagacaaacacctattcttctataggaaatatgataaaaaaggtaggctaaattgagtagaagaggtgaaaggaatgaaagggatggacaataatgcaccacatggtttcttcgggagtggatcggatagttatgaacaaatgatgttaatgggaggaggacaacaaggatacggtggaattccgagctggatgggcggaacacctggagggttttctacatcagtagcgggtgtacaaactggaattccaacattaacaggaggatttccatcatcggtagccggagtgcaaactggaatcccaacatttgttggcggagcagcgggaggagtaccagtaggcgtaccaactgcatttccatctttcgttggaggagtacagacaggatttcctgtaccgggagtaggtgttgtagcaggaggagtaggtggatatccgcaagtagttcacggctaccatggtcatcatcaccaccatcaaggtcaacatggccatcatggacatcaccaccatcaaggtcaacacggccatcatggacatcaccaccatcaaggtcaacacggccatcatggacatcaccaccatcaaggtcaacacggccatcatggacatcaccaccatcaaggtcaacacggccatcatggacatcaccaccatcaaggtcaacacggccatcatggacatcaccaccatcaaggtcaacacggccatcaaggtcatcaccaccatcaaggtcaacacggccatcatggtcatcaggggcaacaagtacatcaccacggtcaccaccacattcatccgcaagctgttctttatcaaactcaccaaggccaacatggtcaccatggacatcaccaccaaggccaacatcatggacaccaaggtcaccaccatcaccaaggtcatcaaggccaacacggtcatcatgggcaacaaggccaacatcatggacaccaaggtcaacatcatggacaccaaggtcaacatcatggacaccaaggtcaacatcatggataccaaggtcaacagcaccaacagcaccaacaatatcagcaatatcaacaacaacaacaatcttctccttggacaggtggaattggagcaggaggagcaggggcagcagcaggagcagctagtattagtggagcagcaggacacgcagggcacgtgggtcattaatgattggcagaaaaaaagccataataaaaaactgctaggaaatcctagcagtttttttcagcttcttgacgctgacgttcaatttcagcacgaagttgtggttccggtgcttgccagccttctggctttagaatcttaccgtcgccttcacggaatcgaggtttcccatcagggaatagttttgccatgttggcgttgtttacaatttcgaatcctttatctggacgtacacccatttcggcaaacgttccgaatgcaaagtaaataaggtcaattagtgcatcgtattgatcttcaacagtcgttgcctctagaaattcttctagttcttcctgcataaaacttgcacggatttttgcacgctcttctgttaattttgttggagtatttgtcacaggatgtccgaatacttcatgcattttcgcaacaagttcgtatcctttatctaaacctttttcgtttgtcatgttgtttcatcctttcttacgttatgccgaagtttattgtaacataaggtgattatgaaatgaaaagaacatcttattgaaataagatgttcgctcgttattcttctttttttattaaaagcgatgaaataagatcgatgccaaaaataccgacgagtaacattggtataacgacaagcaagtaacgtgtgaaggaaacattttttaagtatgtatgagcaaataaaaagacgccgagaaataaaataccatttaaaataggctttactaattttttagacataagctcccccataaatatcttctctctctatctaaaataaaaactcctctctccgttgtatcatgctggagagaggagttcaatcatttctcattcaattacaccagaatttgtaatattcacggtgtattttatatgaactggaacatctttatacatttgtctccattcttctaatttgaatgggcgataatgttgcttatactttgcacctagcccgagaggatcgacgcctaaagatttaaattgcttaattaacttagcagcttgtttatctaattgtttttggacatctttttcaatgttttttgtgttcttgttattttctaagttaatttgctttgatagttcttgaatacgtgcgtcaagacgaacgtgaatgaaaaaagaaggctttccgtttttaatttttatatcgtaagttggaacagaacgaatattattaatcattacgtacgcagaatctgttttaaattcatgtgaatctaatttatgtttctctaatagtcctttaaatatgaacatatctttttccgcaattttaccgatatatttatcctttttaaaaagaccaattccagtgatttttattttatcaccatgcttctttagaatgggaatatagtagtcttgcccttcttgataataacgaaatgctcctacatgcagattatccgttggtaaaggaccggtctccatattatgttctaacaacttttttatataaattgcaacgttgtatgaagtggaatatttgccttttaaaagttcagtaccattcccctctaataaagcggcatataaagcgttccctatattcacatctcgaagtaatgtatcgaatgaagtagacattcctgttttggcaagtcttatcgtatatagagcgacacgcatttgtccactagcaaaaggttgagaagattctaatgatgtatctgcttttacttgttttaccgcatttgcagttccttcaaaaacttgaactttatttccttttttctgaatggggcaaacgaatgtcacttttactttgttgccttttgcaacgtcaaatacggatccttgaataagttgtacatcgtcgataatatttttttgtaaacatccaattagactgaagaatgttatacaagaaataagtattaatttgcttgtgcttttgattttttccattttcttttcacccacacaataataaataggattgggatgtatacataaatgagccaaaaactaacctttgatacattactaataaagttattaatatcgtgtctgtttgttaaaagttgtgaaacaatgagggtgataaggataaaagcgattaaaacccctctttgttttacacggaatatttcatgagttgctctcattgacgcccataaagggaggataaaacttgaaataataacgagtgcgtagcctgaaattgcaatatattcgagtctttctataaatggtaattgaatgacttgggtcatagaaagttgtgcccatatcgtttttaataattgtttttcactaaaaaatgcaaaggctaaaagggtgctaaataaatatagaagatttgaaaatagtgctccaagctgagcgtatttatgagattgcataggctttttcacaaatggatataccatgaggtaaatctcaaaaccggtcatactgtagattgacagttgagcggattttaaaatgtctgaaaaagaatgtgtgaatataggtagtaaattatcccaatgtgaatatttcaaaacgaataagcttagaaataaatatcctaatgtaccaccaacagagatgacacaaatgccagtaatgacacgaaatccagaagagataatgtaatagctaactaagcataaaaagagtgttaacataaaggtggaagcggtaggaaacatccatacttgaataatttcaacatatgttcgaataaccgaaatgctgacgtttaaaaaataagctgcaaagatgatattaaagatattccctatccactttccgaacgtttgcctttgtaaatcaattaaatttccatttgtttcttttaataaaaaatacatcatccatataaggagatggatacagagtcccgtgattagaacgcccatccatccgtcgtatccagcggcctttgcgatgattcgagcgaagccgagaacgccagcaccaaactgtgcaccgtgaattaagaagaaaacaaagacaggagatatttgatatttttcttgaactttactcatcaatgcacctcatttcttaatcatcaaaatccgatctatgttttgttgaaattcctttcgcagctttttttacatgttgtggtcttgcttgtacatctcttgtatcaatcattgttaaaggaaaacggatccaagaatctttaacagattgttgtcttgttggatagaacaaagcgtacggcttgcgtaaagaagtaagtctaaacagatgggtgaataaaaagataaatccaagtgaaataccgaaaagtcctcctatttctgcaaatatgagaaacgggaaacgtagtaatcgaaccgcattacccattttataaataggtgtaataaaggaagcgagtgctgataaggcaacgataattaataaaatattactcgttaaacctgcttgtacagatgcttgcccgattacgataccccctacgataccgagcgtttgaccaactttcatcggtaaccttgcgccggcttctcttaataaatcaattgcaagttctaaaaagagagcttcaattaaaggcgggaacggtacttgtgctcttgataaaattaaagtttcaagtaaatcactcggaataagttcataatgataatttaaaactgcaacgtataacggtgtagcgcaaattgaaaatagaacggcaattaatcttaaaacccttgaaaatgtagcgtacatccaggagacgttatagtcttctggtgaaatgaaaaaatcgaaataggataccggtgttagtaaaacactcggagaaccatcaacaaaaatagcaattttcccatcaataagcgcttttgtaactctatcagtacgttctgtattgatatatagagggaaaattgatttttcacccatcaattcttgtatataagcactatcattaatttgatcatattcaagagcgcgtaatgattcctcgagaaaatctacattatctttttcagcgaggttgtctaaatacatcatgacaactttcgttttggaaaactcgccgataatcatttcttttgtttgtaaatctaaaacaggcagacgttttcgaactaaattaatgtttgtatcaatagcctctacgaaaccttcttgcggaccaataacagttgattcgtttaaaggaggggttggtgcacgataattatcaattgcaatgtttgcaagcatacatttttgatcttgctgattcaattgaatgatcgcatgtccctttaaaaccatgtcttcaattttttgcaagtcgttcgtaattgtaatgccactcatcggaatatgttcttttagttcttctagcgaagtacaaggtctctctaaaagagtaggcattaaatatttttgtaatttctccccatcaagtgaagggcgatagtaagaaatccaataaggcatcgtttcatcgtcagatgtatggtaattaataaaatcactagactttttaagtttctctattaaatcttgtagagaatgaatacggtctttttctggttttgtaaagtcataaatactattacctccagagctttgttgcttactttgagaaggttcatcttgcttagcgttttgttgtttatcttgagacgaatcaccttgtttagcactttgttgtttatcttgagatgaatcatcttgtttagcactttgttgcctatcttgagacgaatcatcctgtttagagctttgttgcttatcctgaaacgaatcatcttgtttagagctttgttgcttatcctgaaacgaatcatcttgtttagcgctttgttgcttatcctgaaatgaatcatcttgtttagcactttgttgcctatcttgagatgaatcattctgtttagcgctttgttgtttatcctgtgaagattcatctcgtttagatttttgttgtttatcttgagatgaatcatcttgtttagcactttgttgtttatcttgagatgaatcatcttgtttagcactttgttgcctatcttgagacgaatcatcctgtttagagctttgttgcttatcctgaaacgaatcatcttgtttagagctttgttgcttatcctgaaacgaatcatcttgtttagcgctttgttgcttatcctgaaatgaatcatcttgtttagcactttgttgcctatcttgagatgaatcattctgtttagcgctttgttgtttatcctgtgaagattcatctcgtttagatttttgttgtttatcttgagatgaatcatcttgtttagcactttgttgtttatcttgagatgaatcatcttgtttagcactttgttgcctatcttgaaatgaatcattctgtttagcgctttgttgtttatcctgtgaagattcatcttgcttagaactttgttgcttatcctgagaagattcatcttgtttagcgctttgttgtttatcctgagaagaatctttttgctcgttatttttacctttattatgttttatacttctagtctgttctttgttatcatcctcttcattgttagaatgctgctcctggttatctctttcgtttgcttctggtttatttaatttttttttcttacgtaaccaattccaaatcatatgtatgccctctttaatcttgtaatatagtgctattttgtggctaattttgtatattattcatttatttatgaaaagaagaaggagattagttgcatggaaaaaaatctttagtaagcagttcatactataacggggagagggagagtctgtgcaaattgtaaaaaaagagaagtttgttttaaaagagtttacgtttgaaaatggtagggaaattcctgttcaaatgggatacgagacatatggtacgttaaatagagaaaggtcaaatgtgattttggtttgtcattattttagtgcaacaagtcatgcggcgggaaaatatacagtgcatgatgaggagtctggttggtgggatgggctcattggacctgggaaagcaattgatacaaataagtattttgttatatgtacggataatctttgtaatgtgcaggtgaggaatccatatgtgattacaacaggaccgaaatcaattaatccagaaactggagaagaatatgctatggagtttccggtttttacatttcttgatgtagcttgtatgcaatatgagttaataaaaggtatgggaatttcaaggttacacgctgtaatcggaccgtcggcggggggaatgattgcacaacaatgggcggttcactatccacatatggtagagcggatgattggcgttattacgaacccacaaaatccaattattacgtcagtaaacgtagcgcaaaatgcgattgaagcaattcaactggatccaagttggaaagatggaaaatatggagaacagcaaccgataaaggggcttcatttagcaaatagaatgatgtttatgaacgcgtttgatgagcatttttatgaaatgacatttcctcgtaatagtatagaggtagaaccttatgaaaagttttctacactaacatcatttgaaaaagagataaataaagcgacatatacaagtttagagctagtagatgcaaattcatggatgtatactgcgaaggcagttttattgcatgatattgcacatgggttttcttcactagaagaatctctttctaacatagaagcgaatgtgcttatgattccgtgtaaacaagatttgcttcagccgtctcgttataattataaaatggtagatattttgcaaaaacaagggaaatatgcggaagtatatgagatagaaagtataaatgggcatatggcaggagcacttgatatttatttatttgaaaaaaaagtttatgaatttttgaatcggaaagtatctagttttgtgtagaagaaaaatgatggggaaaaggtgcaatgtttgtagtaggcaccttttttcacatgatttgtagacggaaaatatatgtagctattgctataccaaagaacgctatgctaagcaatagaaataagaatgacatttcttgtgaggattttatttttttattatttttcatactgagagtaataattgcagcgattaagaaaatgatgcccataatgaaaagggaaagtgtcattttcattggctcctttcataaaacaagtatattgaggatacaatgcaagagttatgtttgtaaagaataagttttgcgggaaaattgagaaatagtttttcgattctttgcgttctttcttttgcatgctaaaattggtagagaatgtttgtgaaaaagaaactaaaggttttattgtatataaggaggaactacatatgacagaagttaaaacaattactacagaagaagtgcaagagcgtttagaaaatggagaaacgttatttttagtggacgtaagagaagatgaagaagtagcggcagggaaaattccagaagctgtacatattaaaatgggtgatatcccacataaagtagatttctttaataaagagaatgaatatatctttatttgtcgttcaggaatgcgcagtgaaaatgtatgtcattatttaaatgagcaaggatttaaaacagtgaacatggtcggcggtatgcttcaatatgaaggtgaaacgaaatagtaaatagttaaaaacttgaaacgagtatgtttcaagttttttttcttttgcatacagtatataaaaggaggatggagaagatgggaattaacatgcgtaaagtaaaaattataaataatacaggagctgttaatgttggcgattgttatgatctctcaccttttgctgtatcaaaagcgtatgcgggtgccggaggggcgagtgcggctatttttttaaatgggaaaaggcagccagaagcggtaattagaacatcagtatttcttccaccattagcaacaagtacacgtacgttaggttcgtaaaggaaaggtagtgtgtaagtatgccggcacatataaaagagtttgttatcgttaataatacaggaaatatatttacgggcgataatttaagagacacttcatttactgcttcgaaatcgtatagtggttcaatggggtgtacttggattgatgttgttactgtaatagggacggagacaaagctttgtttacagccaggagattctgtcacaacaacgtatacgagaggtactcctgctggtactgtaacaggaacgaatactgggcaaggtgcaaatgtgtcgagtactatgcaggcggtgccaaatatagataatatggattcagttgctggactcccttaaggaattaagggagtttttattatttaaaataaaaatagtcttggaaattatttttgaaaatagattaagaagaggtttatttattatgaaaaagaaggtttgtaggtggtgaaagtgtgaagaaacgtgataataatgggaagcaaaattcgttaagctctaattttagaattccacccgaacttattggacctactttccctcctgttccaactggatttacaggtatagggattactggcccaacaggtccacggggtccaactggtcctcaaggaccgagagggttacaaggtccgatgggggagatgggcccgacaggacctcaaggtgtgcaagggatacaaggaccagttggttcaataggtgcaactggaccagaaggacagcagggaccacaagggttaagggggccacaaggagcaacaggagcgacaggtttacaaggggtgcaaggaattcaaggtccgattggttcgacaggagcaactggagcgcaggggatacagggcgtacagggattacaaggtccgattggagctactggacctgagggacctcgaggaatccaaggtgtgcaaggagtgccaggggtaactggtcctcaaggaattcaaggagctcaaggaattcaaggggcacaaggactaactggaagtacggggttaacgggagcaactggtcaggggataacaggcccgactggaataacaggtccaactgggataactggaccatctggaggacctcctggtccgacagggccgactggtgcgacaggtccgggcggtggaccgagtggaagtacaggtgcgactggagcaactgggaatactggagctacaggaagtacaggggtaacaggagcaacgggaagtacaggtcctactggaagcacgggagcacagggcttgcaaggaatccaagggattcaagggattcaagggccaattgggccaacaggtccagaaggtccgcagggtattcaaggtattcctggtccgacgggagtaactggtgaacaaggaatacaaggagttcaaggtattcaaggggtaacgggagcaacaggagatcaaggtccgcaaggtatacaaggggctataggaccacaaggggcaacaggggtaacaggagatcaaggtccacaaggaatacaaggagtaccagggccatcaggagcaacagggccacagggagttgaagggatacaaggtccgatgggtgatataggaccaacaggtccagaaggcccagagggacttcagggcccgcaaggaatacaaggtgttcaagggccagttggagcgacgggtccagagggtcctcaggggatacaaggtattcaaggaccggtaggagcaacaggcccacaaggtccacaagggattcagggaatacaaggtgtgcaagggataacgggagcaacaggagtacaaggagcaactggaattcaagggatacaaggggaaataggagcaacgggtccagagggtccacaaggagtgcaaggtgctcaaggggggattggtccaacaggtccgatgggttcacaaggagtgcaaggaatacaaggaattcaaggcccaacaggtacacaaggagtgcaaggaatacaaggaatacaaggaattcaaggtccgacgggggcaacaggagatacgggagcaaccggggcgacaggggaaggcactacaggcccaacgggagtaaccggtccaacaggcgtgactggcccatctggtggaccagcaggaccgaccggtccaacggggccatcaggtccggcgggagtgacaggtccatctggtggaccacccggcccgacaggagcaaccggggcaacaggagtaacaggagatactggggcgacaggctcaactggagtgacaggagcgacaggagaaacgggagcaaccggagtgacgggtttacaaggtccgcaaggaatccaaggagtgcagggagagataggtccgacgggtccccaaggtgttcaaggtccccaaggaattcaaggagtaacgggggccactggagatcaaggtccgcaagggattcaaggcccacaaggcgacataggtccaactggcccccaaggaattcaaggcccacaaggttctcaaggaatccaaggagcgacagggggaacaggagcacaaggcccacagggaatccaaggtccgcaaggtgacataggtccgactgggtcacaaggtccaactggaatccaagggatacaaggagagataggaccaacaggtccagaaggcccagagggacttcagggcccgcaaggaatacaaggtgttccagggccagttggagcaacgggtccagagggtcctcaggggatacaaggcattcaaggaccggtaggagcaacaggcccacaaggtccacaaggaatacagggaatacaaggtgtgcaagggataacgggagcaactggagcacaaggagcaactggaattcaagggatacaaggggaaataggagcaacgggtccagagggcccccaaggagtgcaaggtatacaaggggcgattggtccaaccggtccgatgggcgcacaaggagtgcaaggaatacaaggggttcaaggagcaacaggtgcacaaggagtgcaaggaccacaaggaattcaagggatacaaggtccgacgggagcaacaggagatacgggggcaaccggagcgacgggagaaggaactaccggcccaacaggagtaactggtccaacaggggtgactggcccgtcaggaggaccagcaggaccgaccggcccgacggggccatcaggtccggcaggagtgacaggtccatcaggtggaccacctggcccgacaggagtaacaggtgcgacaggagtaacaggagataccggggcgacaggctcaactggagcgacaggagcaacgggagcaacaggagtgacgggtttacagggcccgcaaggaatccaaggtgttcaaggagagataggtccaaccggcccacagggtattcaaggtccccaaggaatccaaggagtaacgggggcaacaggagcacaaggtccacaaggaattcaaggcccacaaggagagataggtccaaccggcccccaaggaattcaaggtccacaaggtcctcaaggaatccaaggagtgacaggggcaaccggggcacaaggcccacagggaatccaaggcccgcaaggtgatataggcccgaccggcccacaaggcccccaaggaattcaaggcccgcaaggaattcaaggtccaacgggagctacaggagcaaccggagcgacaggtcccctccagataaaacagtattgagtccatcatatcagatggactctttttttactgtctacctataggggataataccagaaggttgatatggtgtctcttttttatgaacctggagaggtttgaactcaagaaattaattctataaattttatattatgattttttggtttatgacatacagctagttgtaacagaggaggtactgtattctatgttttcttatgcggatcctataacgtagaaaggtaaaatttctggaccagattttaattagtgttccttcagctttaatgaggaggtgtacgaagatgttgtgactatacctgctgggtattattaattgtgaagtcaaataagaaaacaatttattagaggaagattagttagtttaagtatcagatttaggtgtttaacagggggtactaattaatttcagttctttcatgaaaaattatagaaaaagtatggataaacaaattcttgttttaagtgaattttgtgaatgtgggggctgctttaaataaagatggtcaaacactatgtaaataattaggaatgttaaaatatgcaaaattgcatattaaatattttaaatcttatgctaaccttataatgcgaaatataacatttgttggtaattattcatttttgaaagataaaaaatgaataattacagtgaattgtataccactgtcctatagtataaacgataataacgaaagctatttgaagtcctttgaaggaaataagttattgaaaaaaattccatatagaaaatttgttgaaatttcagatgtaacaaatgtcattttatttttaatgtctgataaaagcgatgccattagagggcaaaatattgtggttgactatggatatacaattgtataaataaatcatcttgggaattaagggtgtggataatgagtttactaattaaagatttaacaaagaaatttgacgagcatgttgcagtggataatttgaatatcgagataccaaaaggtgaaatatttggattcttgggcgggaatggagcaggtaaaacgactacatttcgaatgatacttggacttttatcgaaatcaagtgggaccatttcatggaatggtaaacctataaattatggtgttacagataaaattgggtatttaccggaagaacgtggtctttatgcgaaaatgactgtcaaagaacaagttaacttttttgcaaaactaaagaacatgaaaagtaaagatgcagaaaaagaacttcactattggctggagcgttttaatattactgagcatctgaacaaaaaggtaggagaactttctaaagggaatcagcaaaaaatccagctgataacagcgattatacataagcctgaactcttaattttagatgaaccatttagtggtttagacccagtaaatgttgaaatgttaaaagacgctgttcttgatatgcaaaaacaagggtcgtcaattctttttagttcacatcgtatggaacatgtggaagagttatgccaacacatttgtattatgcacaaaggtgtacctgttgttcagggtgacattgccaaaattaaaagtgattttggtaaaaagaacgttgtaatcgttggcgatcatgactttgaccatttgaaagaaataaaaggtgtagaaagtatgaagaaacgtaaaaatgcagttactcttaaaatttcatatgaagaagtgtcacatgttttatttaaagagataacaaaattagggtatgttaaaaagtttgcagtagaagagcctacattaaatgatatctttattgcgaaagtaggtgcacaaaatgaatagtttctggacaatttttttacaaaactataaatctaaagtgaaatcaaaatcatattttgctattacaataatagtttctatgttaattataggattgatgaattttgacaagatttataacttgtttgcaggtaacgaggacgatcaagttgttgttgttacagaaaaagaagaattatattcaaccattcatcaagtgtttaaaaatgtcgatagtaagatacaagttaaacgtagcacggataaacaaaaagcagaatcaggtgttaaaaatggtgattatacatatgcaatcgttgtagaggaattgaataataaacaattaaaggctacgtatataactgagacggatgtaaatcagcaagatgttagcaaggttcaaacgattttatctcaaatacaatcttctaatttcgcccagcaattgaatctatctcaagatgaattaaaggtgttaacaacgccagtagaaattcataccaaaacggtttcagataaggttaaagatggagaacatactgagggtgtagggattttaattaatgtctttatcatgctaaattatctaatgatattaatgtatgctgcacaattagcaacagatgttgcaacagagaaatcttctcgtgttatggagttagttgtttcaagtatttcgcctaccaaacatttatatgcaaagctattctcaacattattggctggtattacgcaaatcataatttggggcttggtcgcaactgttggatataaaacagcaattaatgattcgaaaaatgatattttaaatagtattgatttaaattctgttgctccaactctagtgttttatgggattctattcttcacattaggattcttattatatggctcattatcttgtctatttggctctatcattacgcgtatagaggaatcttctcaagctgttatgccgctgatgtttatgttacttgctgctttgtatatagcaatttatggaatgtcaaacccaagcagcatggttgttaccattactagttatgtacctttcttcactcctattgttatgcttgtacgaattggattcctcaatatcccagtatgggagattgcgcttgcattagcaattctaattgcaacaatatgtatgatgattggtttaacgagtcgtgtttaccgcggtggcgtattaatatatggtaaaggtgcatttagtaatatcaaaaaggcaatcaaattagggcgaaaataggattcgtctattcatttctaaacttaaatttacaaagatctgcatagttaaactgtgtagatcttttttgttgagaaatttatataaataaatataaaaattgctgtattaggctatttttcaaagagaattttaaaaagctcccaaaagagagtaaagaatcgagttctagcgaacaacgtagagcgataattaatataatttatgtctttctccaaaatggagaaaagaagtagggaaaaatttagttttaataataatcatttatttgctacataaagaaaaccccttgactatcaaggggtttttcatatgaccccggagaggctcgaactcacgacctccaccctgtcaaggtggcgctctccctgctgagctacgggatcccaactataaatgttaccatcagcaatgtattttcatttcattcgtgtaatcggagaatttgtacaatttgttgagtattgtaacatttgatgtattcctataatagcaacaaactttaatggtgtaaaggtttaattttccgaatattcatattctaatttttgtataaaaaaataagccccgaagagcttattttaataataatatcaacgcaattatcaatgatattttcaaaaatacaatcataaataatggagcttgttcataagctatcgtcctgtaactgtcattcctgctgtgtaaattgtatcaatagaaccgtcagcgccttttatttcgactttataacgatatgttccatcttcataaatatcatcgccatatcctgtgaaagttgcaatttcatcattgcttccagctgggacccattgattttgccaacggaagttggtttcaaattctccccatctatcgccatatttcttttcaaggctgacattgtaatgaatttcttcagctcggtcatttgtaattcttgcaattacgctgttaccaaaagtaacttgtgtagagtgtacctgaactgtaacaccgttcaccgtttcaccaggaccacaaatgtaatgacaaccatcccattcgtcagcatgtgcttttggtgtatcaatgttcataaccgttaaaccgcctaaagctaatgcgccagttaataatactttacaaaatgttttcacttgaaattccccctaagtatattctcaattcgttcgatagatatcacattaatctaatggaacgttttttccttaagtgtattcgctatgaatctttcatcttgtagtaatctaatcactacataaaatttcatagttttgattccatatatgtatcatgatttacatagaacaaatctgttaatacgttttggttatttgcttatcccactacttttattaccttttattggtaaaacgttgatttaattatataccattattatctatttacaagagaaaacaatactgtatgcaaaaatgcataatacaagcagtgttgggtttcgattaatatttgagtggaatctaatgctaattttttatgtttaacagtataaatctatcaatgtttattaaagtcataattgataaacattgtccagggggcgcccttcatgctgagatacaggatcttcaaaagggaaagtataagcgattatgctcgtaatgtatgaagggataatgatgagaagaaaattcagtagaaaatagtttttgaatgtagctgttatattatttccggtatttatctaaaggattttcatcgcttaaatcaacaattaaagggcataaaaataacagtggtaaagcggcgttagcttgatgaaaagtatcattagacatatattgcctcccaaaacaatacggacaatctttttcaaatgtcacgagtatcgaccatatgtcttttactttccacttctttttacaatacgtacaacgcgccattgagttcctcctcagtttaaggtgttttctaatatattctactttattgtacgaaagtcatttgaatttgatgtggtaaaatgcaaaacaagcctaacctcgttctacacttagggaggggttaggcttgttttaattccgttcaaagcctctttgtatcaggccgtttatacattgcctagatagcttcgcgttaaattcgggagaataatttttccatctttactgtatttttcgaatagctctgataggagaaaaataaagtttttatactgttcgtcattttctttcggagcataagacgctgatagatttcttcccaaaaacccttcataatcaaaaagtaaatcattttgatattctttaaactcatactttccatctttaaaaaagctgttaaatacttctggagtttcatctattccaccgctaaagcctttaaagtttgggcaggttttctggcaaatttctgcattctctttaataagtggactagttaaatctctgctattccaaacaagtgcaacatttgctttttgttttaaaattcgttggcattcgattttgaaagcttctttatcaaaccaatgaaatgcttgggcaacagttactaaatctacactattttcttttaaagtggtattttcagcagttgcttttatggattgaaaacgagaatatagttttaacgattgctcagccatcttcctcatatcatcatttggctcaactccaataacatgtaaaccactttcaagcagctggcggctaaatatccccgtacctgaaccaatatcagccacaatccgattccctttcacttggttagctggaagcaagtaatcaatatattcattaggataactagggcgatattttgcatacatatcggccctgtcagtaaaattttctgttgttttcacagcactaccttctttcttccgatattatgtacagaaatagaaattaaatatgaattccggcattagtctttaagtctaccacttaagagtccagctaaatagaaggcctcagtttctttattcaaatatcctttatccgtttagtatactattttagataatatcttccaaaagtttataatggcttactcaactaaacccacataactgacgttgtttaaacaacgtcaattatgttttagactgtatgtttttatgaatttatttaataatgtatgagcaattgtatgtcgtattacgtttacataggtaagagattttcatttttgctatttaaattggccaatatatcctttttacaatttactgaaaatcatgtataacagagatacatgattattttatctcgctatttgcgggcagtaagatcccttacctcgaaattcagcaaaagtaaagaagttaggttcgggtcggaatgcccgtaaaagtccgattcgtgagggttgatgaaagtttcactttataaatattcagaagtagagggagaaaagttgtaatggtaagaaaaacgttcaagatgcgcgtgtctaaaaatagaacgatttcgattaatggatcgattcttgatgtggatgttacacatgatgaatttttacaagagtttgttgagtgggttgattctaaaggttggtcgtttatgggaataacagatgagattacgcccgaggaagctagtcaaaagttaatagattcgttgattgatgagaaggataagaaagagtaattccttcttatttttattgtatatttatgttctttatcgtaaaagtatgatatagtaaaaaatagtgaaatttcttccaatataatacaaatcacatatgattggtagatttattattttgttaaggagtaaatggaaaagggagagtcatatggtaaattttaagaaaattttggtttttattacagttatttgttcgttttttttgacgcccataacattgcgtgctgagacgaatattggagtaaatccagaacaagttgcaccaccacctgcggaaggaccgaatgtttttagtcagtttgcaacgacaattgatgcgaaaacaggagatgttttgtatgataaaaacgcatatcaccgagcatatcctgctagtacgacgaaggtgttaacagcgattttactcatggagcatacaaagccagaggaccaatttacattttcacaattagcattagatcaagagaagagtaattatcaaattgagtttcaacctggagagacaattaatagaaatactgcgcttatgattttaatggtgctgagtgcgaatgatgtgtcgtatgcgattgcggagcggattggcgggagtgttgagaatttcgctaatatgatgaatgagaaagcgaagcaattaggagcgaaagatagccactttgtaacaccgaatggattgcatgatccgaaccattatacgacgccgtatgatatggctatgattacgaagggtgtgcaaaagtatcctgaaattttacaagcgatgaatacgaaaagaacgacagttacgacgtctaggcagacggtgtctatttttaataaatctaatttttttgaaaatccatatagcattggcggtaagacagggtttacgaatgaagcacgtaatacacttgttttattaaatgagaaagatggaaatcgtattataagcgtagtaatggcttctcaaagacctgaaatttatgaagatttgaagcagatggcggaatattctttcggtcaatttacgaagcaaatggtgcttgataaacataattggcatcaaaaaacaacatatttaaataaagatgttaattctgagttggaacaaagtgcggagcttatgcttaagaaagatgaagggaaaaatgtgaaaactattttccgggcggcttcattagataaagaatctttatatcataaaggaatacatcgtggtgaggtagttggtgcagttgatattacgaaaaataatcaaacaattgcgacggtaaatgttctttcaacagaagatgtcacttttacgatgcctaaaaaagatacaactatgcctgaagtaaaagactcaaatgtgaaagtaataagtgttgggataggtgcgattatattatttggagcaattttatatgtagtgttgcgccgaaatacaaaaggaatgaaatcagaaggtaaataaattactaataaaaagactgtgtaaaattttggcacagtcttttttctatattttaaataactaataattgtaaattttcttattgcaataacttaaagttcgttatatcatttacttgtgttcttgttaaagaacgtaagcggatattgcatacttcaaataatataaaacaacggagagggagagagacgatgaaattaatatggaagataattagcaacgcgatctcatttgttttatttgcattgatggtttttttagcttttgtagttatttcttcaaaagcaagcggtggtgatccgacagtgatgggatatcaatttaagagcgttctttcaggatcaatggagccgacgtttttaacaggatcaatcattgcaatagaaccaaacaaagatggttctaaatatcaaaaaggtgatgttattacctttaaagagaaagatcaaaaaattatcactcaccgtattatcggtgtgaaagatacaaatggaaaagtaatgtatgaaacaaaaggggataacaacaacggaccagatttagagccagtacttgcagaaaatgtagttggaaagtatgcagatattacagttccgtatgttggttatttactgaattatgcgaattcaaaagcgggagcagcattacttcttattattccaggagtctttttacttgggtattccgcgatttctatttttggtgctattcgtagcattgacggagaaaagaaagataaaaaagtagaacaatccgtctagttcgtttggttatactttccgtttaggaagttaacaaatatatattaaggggatatggacatgactttaaagaaaaaattaggaatgggtattacatcagcagtattaggagcagctttagttggtggaggaacatttgcatttttcagtgataaagaagtgtcaaataatacatttgcggctggaacactggatttagcattaaatccatcaacagttgttaacgtatcgaatttaaaacctggggatacaattgaaaaagaatttaaactagaaaataaaggctctttaaatattaaaaaggttctactgaaaacagattataatgtagaagatgtaaagaaagacaataaagatgattttggtaaacatattaaagtaacattcttaaaaaatgtagataagcatgagacaattgtgaaacaaactactttagataaattaaaaggtgacacacttacagctgtagataatgatttatcggcttggttctgggatgaaaaaggtatttcagcaggtaaatctgataaattcaaagtgaaatttgagtttgttgataatggaaaagatcaaaatcaattccaaggcgacaagttacaattaaattggacgtttgatgcacaacaaacagcaggtgaagaaagataataagaaaaagggctatcacatggatagccctttttctatttttctagtatttgtctatcaattttaatagttctttactataatatagataatgttctgtataaagaacgtaatgttcgatgggagagattaagatgctgaaaagaccgcgtaattttaaaaagatgcttatattgccgtgtatgtgttctattacgttttatttaggatctcaaattatgacgcatacagaagcggcgttcattcatgaaacgaaagtagaagcgacgctttctacagcaattatatttccgaaaacagttaatacgttaaaagagcaatctgagaaacataaacagtttattgagcgtgagtatggaacgatgaagggaaaatcgaaagcaacttctattgaagaaataaaacaggcgatttctgtatggcaacaagggcgtgagaaaattgttgctgagaaggaagccctgcaaaatgtatatactgaaatagaagctccttacaatcaaatacaagaagaattaaaggtaaataaagatgagtcgatgcagcaagtgtccatatatgtaaatgaaggcttccgcagtatcaaagagaagcgtgactatattgagaaagaaattagcttgaaagctattgatgagcaaattcaggctcttcagcaacaattaaacgttgcaattgaagcggaaggacaaaagaaagccgaagaacagaagaaagtagaagaacagaagaaagccgaagaacagaagaaagtagaagaacagaagaaagcagaagaacagaagaaagtagaagaacagaagaaagcagaagaacagaagaaagcagaagaacagaaaaagctagaagagcaaaagaaagcggagtaactgctttagtgaaacagccggaaaacaagaatgtggtgtaagagagagtgaacgaataagcaagactagtaatatttatacgagtgtgagggaacgttagccctcacctctttgtttttcttttttcttatagtattaaatgatttgagtgtgaaaaaagttataaattatcattgtttttttctgaaaagtctaaatgatattgagaaataaaaataactgaaaatattaataaatatgtgttgtgtttatatagggttgttcgttataatgaacataaggtttttaaaaaagaacacatattagctaagctaatatagttttctttacatctcttattgaaaaataagtgataaaaatataaaaaaaagctagggggaattgattgtgagtctgaaaaagaaattaggtatgggagttgcatcagcagcattggggttagctttaattggtggaggaacatttgcattctttagcgataaagaagtatcaaacaatacatttgcagctgggacgttagaccttacattaaaccctaagacgcttgtagatattaaagatttaaaaccaggggattctgttaagaaagagttcttattacaaaacagcggttcgttaactattaaagacgttaaattagcaacaaagtatactgttaaagatgcaaaaggtgataatgctggtgaagactttggtaagcacgttaaagtaaaattcctttggaactgggataaacaaagtgagcctgtatacgaaacaactttagcagacttacaaaaagttgatccagatcttttagctaaagatatctttgctcctgagtggggagaaaagggtggattagcagctggtacagaggattatctatgggtacaatttgaatttgtagatgatggaaaagaccaaaatatcttccaaggtgatacattgaatttagaatggacattcaatgctaaccaagaagctggggaagaaaaataataaaaaaagcgggtattcccgcttttttttataaagaaaaagaagtgctggttgtaagcacttctttctattattatttttgattttgcttccactttgtaaattcaagaaattcacgaaattgttctttggagacaccagagttcattgcatctttaacgagttgtgtccattcggagtctaggttagtttcctttgttgtttcatcatgaagtaaagtatcaactggaatttgtagaactgctgcgatcttttcaagaaactgaatggaagggtttttttgtaaatttcgttctatagaactaatgtaagatttagcaacgccagctttttcggcaagttcagttaatgaaatccctttttgtaaacgaaggcgttttatacgttctccaatcatatttgcgcacctttctatcaatatgtagttgtcttatgatgttattattataacataaacttcgttaaaaagaacaaacctattgagcctgactggatggcttcatacgttggaaaaattgctcgatgtcttgcatggcgataccggcatctagagcttcaagtattaaatcaatccattcttgatccagtgcgtctgtcttatctttgtacaaatgtaattcctccctaattatcggtcataattgctgctacagaatacatgataatgaaatccgattttgtgttttatatagtgaattatcaaatattgtgtagatgaaacaaagataaaatccccattaaactccctctatggaaattataaattgttcgataaaaactttcaatattttcagaaaacattgttgaattgtgatatattcgtatgctaactatgaaatttttacaaatatattaaaaacattacataatatgactaaatattgaaaaaatattgaatttttaataaaatttaatttgtaatacatattatttattaggggaggaaataagggatgaacaagaaaccgttcaaagttttgtcatcaatcgcattgacagctgtattaggcctttcattcggagctggcactcaatctgcatatgctgaaacgcctgtgaataaaacagctacgagcccagtggatgatcatttaattccggaagaacgtttagcagatgcattaaaaaaacgtggggtaattgattcgaaggcttcagagacagaaacaaagaaagcagtcgaaaagtatgtagagaacaaaaagggtgaaaatcctgggaaagaagcagcgaatggggaccaacttacgaaagatgcatccgactttttaaagaaagtgaaagatgcgaaagcagacacgaaagaaaaattaaatcaaccagcaacaggcacacctgcagcgacaggcccagttaaaggcggtctaaatggtaaagtaccaacttctccagcgaaacaaaaagactataacggtgaagttcgtaaagacaaagtactcgttttacttgtagagtacgctgactttaaacataataatatcgacaaagagcctggatatatgtattctaacgattttaataaagaacattatgaaaaaatgttattcggcaacgagccattcacattagatgatggaagtaaaattgaaacgtttaaacaatattacgaagagcaatctggtggtagttatactgtagacggaacagttacaaaatggttaacagttcctggtaaagctgctgattacggtgcagatgctccgggcggaggccatgataataaaggaccaaaagggccacgtgatttagtaaaagatgcattaaaagcagctgtagatagtggtattgatttatcagagttcgaccaatttgatcaatacgatgtaaatggtgatgggaataaaaatcaaccagacggtttaatcgatcacttaatgattattcatgcgggtgttggacaagaagcaggcggtggtaaattaggcgatgatgcaatttggtcgcaccgttggacagttggaccaaagccattcccaattgaaggtacacaagcgaaagtaccatattggggtggaaagatggcagcattcgactacacaattgaaccagaagatggagcagttggtgtattcgcacatgaatatggtcacgatttaggtcttccagatgagtacgatacacaatatagtggtcaaggtgagccgattgaagcttggtctattatgagtggcggaagctgggctggtaaaatcgctggaacgacgccaacgagtttctcaccacaaaataaagagtttttccaaaaaacaatcggtggtaactgggcaaatatcgtagaagtagattacgagaaattaaataaaggtatcggtctagcgacatatttggatcaaagtgttacgaaatcagcaagaccaggcatgatccgtgttaacttaccggataaagatgttaaaacaattgagccagcatttggtaaacaatattattacagcacaaaaggtgacgatcttcatacgaagatggaaacaccgttgttcgatttaacgaatgcaacgagtgcaaaatttgatttcaagtcattatatgagattgaagcaggttatgatttccttgaagtacacgctgtaacagaagatggtaaacaaacgttaattgaaagacttggtgagaaagcaaatagtggaaatgcagattcgacaaatggaaaatggattgacaaatcatatgatttaagtcaattcaaaggcaagaaagtaaaattaacatttgattacattactgatggtggtttagcattaaatggattcgctcttgataatgcttcattaacagtagatggtaaagtagtattctctgatgacgcagaaggtacaccacaattaaaattagatggtttcgttgtatctaacggaacagagaagaaaaaacataactactatgttgagtggagaaactatgctggggcagataacgcgttgaaatttgctcgcggtccagtatttaacactggtatggttgtatggtatgcagattcagcttatacagataactgggttggtgtacatccaggacacggtttccttggtgtagttgattctcatccagaagcaattgttggtactttaaatggtaaaccaacagttaagagtagtacacgattccaaatcgctgatgcagcgttttcatttgacaaaacgccagcttggaaagtcgtatctccaacgcgtggaacatttacgtatgatggcttagcaggcgtaccgaagtttgatgattctaaaacgtatattaatcaacagattccagatgcaggacgtattttaccgaagcttggtttgaaatttgaagtagtaggacaagctgatgataattctgcaggtgctgttcgtttatatcgttaatactgtaaaactaccgagagattttctttcggtagtttttttgtgagcaatgaattttatatagctgaaaaagtcatatataatgtaaccttaagaatagaaatttgttatatatgaagtttatataaataatgaaagaattggataaaaatagtgggagaaggtgagtgaatgagtatttcctctattgtaagtaggcaaaaggaatattttttaaaagggcatacgagaagcatcgaaatgagaaagaataatttgaagaagctttatgaaggcattcagcgttttgaagaagaaatatttcaggcattgaaattagatttaaataagtcagttcacgagtcgtttacaacggaagttggatatgtattaaaagagatttcctttcaattgaaacatatgtcatcgtggagtaaaccgaaacgagttcgaacagcacttactcattttggatcaaaaggaaaagtagtgccagaaccgtatggtgtgacgcttattattgcaccgtggaactatccttttcaattagcaattgcaccacttgtaggagcactggcagctggaaatacaatcgttttaaagccgtcagagttaacgccaagcgtttcaaaagtgcttaagagaatgttagatgaattattcccggaagagcttgtagcggtagtagaaggtggcgttgaagagagtacatctttgctgaaggaaccgtttgattatattttctttactggtagtgttggcgttggaaaagttgtaatggaagcagcagcgaaacagttgacgccgctcactttagaacttggcgggaaaagtccttgtattgtacataaagatgcaaagatagagatgacagcaagaagaattgtttggggaaagtttttaaatgcagggcagacgtgtgtagcgcctgattatatgtacgtgcattcttccgtgaaagaaaagctaattgaggcactgcgacatgaaattacagagcagtatagtaaagaacctttacaaaatgaaaattacgtgcgtattgtaagtgagcgtcattttgaacgattatgtggattcttacaagatggtcaagtcgtaattggtggaaactatgagaaagatactttacatattgaaccgacagtactagcggatattacatggcaagatgctgttatggaagatgaaatttttggtccgattttaccaatcatagagtacgacaatatagaaaatgtaattggcacaatccagcaacatccgaagccgttagcgttatatgtattttctgaagataaagaagtacaaaagaaagtgacgagtaatatttcatatggtggaggctgtattaatgatgttgtctatcaccttgctacgccatatttaccttttgggggtgttggaagtagtggattagggggttatcatgggaaagaaagttttcggactttttcacattataaaagcattttagcccaatctacagcattcgacatgaaaattcgttactcttctacaaaaagtgctttaaaattcatacgaaagttgttaaaatgatgatggtgtttatcagtaggcgtagccgtatgataatagccccttcgcaatggaaggggtttttctgttcgacgttatgtatcaggcgaaaatgaatcaaacatactacataaagaatagaaacgaacgcttgctaaataaccatttttgtttggatcgaaacaaaaaatagtctatagaacataaatatttattcatgaatataaaaatttaaaatttaaggtagataggacgggaaaatgaaaaagattattaaagttgaagcagttgaaaaacattttggaaatcaagtgattatcccacctctttctttagatattaaagagggagagtttttaacaattttagggccgagtggctgcgggaaaacgacgttacttcgtatgatcgcaggatttgaaactccaactaaagggaatcttttattagatgatgaaagaattaacgatttgccgccatataagcgtcatatgaacctagtgttccaacattacgcactattcccacatatgacagtagagaagaatatttgttttggtatgaaaatgcagaaagtatcagcagcagagcagaaagagcgtgctgaagaggcaatgcgtttaacgcagttacttgagttccgtaatcgtaaacctgcgaagctttctggtggacaacagcagcgtgttgcaattgcaagagcgattgtaaataatccgcgtgtattactattagatgagccacttggagcgcttgactttaagttacgaaaagacttgcaacgtgaattgaaaaacttacaacgtaatttaggaattacgttcatatacgtaacgcacgatcaagaagaagcaatgagcatgagcgatcgtattgtagttatgaataaaggacatatcgaacaaatcggaacaccgaaagaaatttacaataagccgaaaacattgttcgttgcgacattcatcggtgaaaataatattgtgaaaaacggggaaggctatgtagcaattcgccctgaaaatgtaaaagtacgttcggttgaagagtcaattttaaaagaataccatcttggacatattgaagatatcgagtttgtcggaaatatggagaagctttatgtacgtgatgagaaaacatcagaattactaatggcatatcaaactgctgaagaggcagcacagtggagcattggagataatgtatatgtaggctgggagcaagaggacgaggtgaccttaaattgaaaaaagggaaattactcgcactacctacagtcgcgtggctgttaattttcttcctaatcccgctcgtattcgtattaggattcgccttcatgcagcgcggagcttacgggacagtagaaatgcaatttacgctggagaatatatcccgtgtgtttgatccattatacttaggaacgttatgggaaactgttaaaattgcagttattacaacagtaatatgtttattaattggttatccgtttgcgtatacaattacaattgttgaccgcaaataccgctctattcttttattattggcaacgatcccgttttggattaactttcttgttcgttcatacgcatggattgttattttacgttcacaaggtcttgtgaatacgttgttattaaagcttggcattattagtgaaccgttaaatttattatataatactccttctgtaatactcggaatggtctattctttattaccatttatgattttaccagtgtatgcagcaattgagcagctggataagcgtaagctagaagctgcttatgatttaggagcaacaccaataaaggcattttggaatataacagtgccgatgacgatgtcaggaattgcgactggttctattttagtattcgtttcttctatcggaatgtttgttgtatcagacgtgatgggcggatcgaaagtagcattaatcggaaacgttattcaaaatcaattcttaggtgcacgtgactggccgtttggatctgcgttatcgattatcgttgttctattctctgttctgttaatttacttatattatcgtgcaacgaaagtatataaatataatgagaacggaggggaataggcaaagatgaagaagtttttagtttcttattcttggttaattttgttattcttgtattttccaatgatggttttaatggtctattctttcaacgactctcgcattaatgcggagtgggaaggttttacattccattggtatacagatttatttcaaaaacaagatgttattgatgcatttgtaaatagtattacgattgcagttataacaacgattgtgacaacggtacttggtgtattctttgcaatcgctttacatcgttataaatatcgttttgaaggggctattaatggccttgtatatttaccaattttaattcctgatattttaatgggattatctttactaattcttttcagccagttaggaatggaacttggacaaacaacgattattattgcacatattacatttagtatttcgtttgttgttgttattttagctgcgcgtctttcaagtatgggacgtgacttagaagaagctgcaaatgatttaggagcaacgccttggcaaacgtttcgttatgtaacgttcccagcaattgcaccgggagttatttcggcagcattattaacattcacattatcaattgatgattttgtaattagtttcttcgtatcaggaccaggatcaacaacattgccactatacatttacagtatggttaagcgcggagtatcaccagaaatcaatgctctttctacaattttaattgttgctatcgtaggattaatggttctatctgaaatcttccggaataaaggtgcagatggtgaagaaaactctggaggacaccttcctttataatacgaacgatatagaaagtacaagggggtaataaaccgatgaaattaatgaaaagaatagctggcgcagcaattagttttagccttgttgctggtgtgcttgctggttgtggtgaaaagaaagaagaattaaatatttatagctgggctgacaattttgatgagcaagtgctaaaagattttgaaaagaaatataatgtgaaaattaactatgacaagtacgcaagtaatgaagaaatgcttgcgaaattacaagctggtggcgcaaagtatgacttaatccagccgtcggattacatggttaaaacaatggcgaaaatggacttattagcgccgttagataaaaagaatatcccgaatatcgaaaatatggtttctaatttcaaaacacctgcgtttgatccagagaataaatattctttagtgtacacttggggtgtaacagggattgcatacaataaaaagtatgtgaaagaagcacctacaagctgggcggacttatggaatgagaaatataaaggacatgtaacgttattgaacgattctcgtgaagtattaggagtgggtcttaagaagcacgggttctcaaacagtacgaaagacgatgcacaattaaagacagcagcagatgatttaaagaagctgcttccaaacttattagcatttgatacagataacattaaacaaaaattcattacagaagatgcttggatcggaacagtttggtctggagatgcagcatttatcgcaaaagataataaagatgtagaatatgttgtaccgaaagaaggcggcacaatttgggctgatacgttagcaattccaaaaggtgcaaaacataaagagcttgctgagaaatttatgaactacttactagatgaaaaagtaagtgtgaaaaactacgagtcaattggttacagtaatccaaatgaaaaagctcatcctcttcatagtaaagaataccgtgataatcacatgattttcttaacgaaagaagagttagatcgtacagaatggcttgttgatgtagacgataagttaaaagactatgatcgttactggacagagctaaaaacaaaaggtaaataagtaaggaaatgcggtttctaaagtagaaatcgcattttttcatagtaggaggaaatcgtttgaagaagaagttacatcagtatgaggtaatgtgtatcggtttgttatttgctgtatttggtattgttgcttggcgcgtacatgcaggtggcgttacagtgatggatacatatgtccgtggattagtaagagggctacaaacggaaagttctcttacatttttctcgtactttacaaaattgggatcagcaattgggatagtcgctacgctcgttataagtttgcttgttttttggaagaagcgttattatgctgcgatgattgtatatccaatgggaattttaataacacatcttgtgaataaagggataaaagagagtgtaaagagagaacgtccgtcattaaatgaagcgctagatgcacttggatatagttttcctagtggacatgcaatgctatcgattatgacatttggatttcttacttatatcattgctgctaatttgaaaagtgtagctgggaaatgtgtcacaacaattttgatgggtatagtaattttatcgattggattaagtagagtcattttaaatgtacattatccaactgatattttagctggttactgcgtaggtggtattttgttaattatcgcgatttactaccatcgtttacttactgagagattagggcttaataaagagagatagaaaaacgtctggaaaaactattattatagtttttccagacgttttttgtttatatcaagatgtgatacagtataagtgacaattgaattatttaaagtaggtgaaaatgtgtgaagacaaatgtacataaagttgataagtgggggaagttaggagcctttttgtatcagtttcgttataccgtaattgtaacgttactgttgctcgcaatcgcacttgggatttttgctccaaagctaccgggagtattaggtggtgacggtttccaaacggaaggcgactatcaaaaaacgaaagaaattttagataaagattttaagaagtctcaagatacgctgctgctcatttttgagaaaaataaagatgcttcgcatgaggaatttaaaaagcgaataaatgaaattgtaaagaatgttcaagagaaagagaactatgaatctttccatcacccaatccaaaataaagaaatgctacaagatgacatcggttatgcgacaattttattttccgggaaaacaaataaagaaagaatggaaaagacattacaatttgctgatgagattgagaaagaaagtaatgtagcattaaaagtaacacctacaggatttccgaaaattaataaagagattaatgaaagaacgcaaaatgatttaaaagtagcagaaatgattggattaccaattgcgtttcttgtattactattttcgtttggtagtcttttggcatcaattttaccgattttgaatggggcgcttagtgttattagtacgatggggatattgtatttcatcggtgttgataaagaactatctattttcgtgttaaatgttgcaccgatgattggacttgcattatctattgattttgcgctattatttgtgaaccgttttcgagaggaagttgctaaacgaacggtaaaagaagcgataacaattacatatcaaacggcaggacgtgcgattgtattttcaggattatgcgtatttgttggattatctggtttgtttttctttaagatagattatattcaatctgtcgcgattagcggaatgattgttgtcattatgagcattttattctcactcacacttcttccagcactattatcgttaatcggtaaaagaatattaaaaaagaatcaagtagcacatacgccggcaaaagcatggcgtaaatttgcacaatttgtgatgaaacatccaattgcaatgattattgttgttacaacatttattgttatttgcttattaccgttacgtacagctaatttgcagttccctggtattgaagctttacctgaaaagagtgatacaaggattgcatatgaaaagtatgaagaagcatttaatgaaactgtcaaaacacacgctgatgttacgttagttgtagagacgaaaaaagatatgaaagaaaaagaaagtctacaaaagatagaagaagtcgttcaaaagttaaaagatgataagaaagtacatgaagtaagaagtttatacgacgggttaactggaatgaaagcagatcaagttgttggaatattgcagtcgccagaatcagcgaaactaactcctgtatttgaagcatacacgcaagggaataagacgacgatagaaatctttttgaaaacaaaaccacgtacagagactgcaaaacagtgggtacgtgactttaaaaagaactataaagaaacggatgttacgtattatctaggcggaatgacgacgtttcaacaagaattagaagatgaaattaaagataaagttgtaattggtatgtctgttatatttggatcgacctttgttatattattatttgcattccgatctatgctcattccaattaaggcaattgttatgaatatacttagtttaagtgcaaccattggaattgttgtttggttatttgaaggtggtcatttcggtttagaagcgagtccggttctgtttgtcttaccaatcttcatttttggcctcgtatttgggcttagtatggattatgaagtatttcttatttcacgtattcatgagctctatgaagaaacaggagataacgatcaagcaacgttagaagggctcgtttcaacaagtagaattattacatcagctgctttaataatgattgttgtaactggtgcattcgcatttactgatattttaccagtaaagcagatgggtcttggcgttgcattagcaatatttcttgatgcaacaattattcgtcttatgctcgtaccaagcttaatgaagttatttggagactggaactggtggttaccatttcgaaaaaaacgagaaaaagcatcgtaaaaaatgctcatcaatatgatgaacattttttatgaatagcaaagcctacattttgcaaatagtatgtgataagaacattacataataagtaggtgaaggcaatgtttcgttattttaagtttaagttaaatgatacagtacagtttgccgagaacgatgggcatatgtatcgcattgtcggttatcggttagaaaaaggattttatccaaaagatgaatggactcatatcatttatgaactacttagagaatttgacgggtatacgatggatgcagaagaggaagaacttgtaaaggtcgttcaagtagaggatgagtattacaaaatacaagaagtatcaggttatcgctatccagtaaaaatgaaacaaaaacaacaagtgatgaaaatagaaaagatggacgatttattagatgcttacaatgattataaaaggttggcggatttctttaaagatttatcgtatgaacaaaaagctgaagaagtattattagaaatgaaaagacttagagcttgaggggcagtctattataagactgtcctctatttttgacagtgcatcaaagtgtgttttccgttacaatgagagaatcaatagaaataaggtgataaacagtatggaaacaaagaaaaagggcgaatggtgtgaaattatcgttccagctaaatggaatggtataagtattgaatcggtattaaaagtagaatgggaaataccgaaaaagctattacatcagcttcgtatggaaaaaggtgttacggttaacggggaacaaagaagatggaatgagcttttaaaagagaacgataagttacaagtccatatgtttgcggaggaagagtacggtgtagatccagaatatggtgaattacatgtagtatacgaagatgatcacgtacttatcgtaaataaaccagagcaaatggacacacaccctgctgaaagaggtggaaccgggacgcttgcaaatcttgttgcttttcattttcaaatgcaaggtttagagacgaaggtgcgtcatattcatcgtttagataaagatacgacaggtggtgtcgtgtttgctaagcatagaattgctggtgcaattatggatcgtctattaatggaaagaaaaattaaaagaacgtacgcagcgctcgttgaagggaaagtaaagaagaaacaaggaaagattgatgctgctatcggaagggatcgccatcatgctacaaggcgtcgtatttctccaaaaggtgaccaagctatcacatattataaagtagaaaagtattttaagaagcaaaacacgactttcgtaacgttacaattagaaacgggtagaacacatcaaattcgtgttcatatgagtcataatggtaatccactagttggggatgtattatatggtggacaaacaaaatatatgtccagtcaagcattgcatgcgatgaagataaatttcttgcatccaattacgaaagaagcaattgaagttgatgtgccgtttcctacaaagttaaataaaaaaataaaagaatttcaaaaagaaaatgcgtaaagtataagttttaacttgaaaaaagtagatttttgcagggatttctctaaaagaagcgaagccgttaagagaaaagagaggtgagaatcacttgatcaaatataagtatgtacttggaatatttttcgcttgtcttttacttactctatttctctatccctatttaccaaatcgtatggcagtacattggaatgtaaatggtgagccaaacgagtttatgagtaaacaagttgttgtagcatttattccctgttttattattttttcatatggatttttgtatattatttcacataatatatttaagtttaatgaaagagggcatggtattataggcggctttataaagaaaattacgttatttatgttgtttattcatatgcttatcctctttattaattttaggaaggtgatatcctttcaaacaggattaacgattgggattagtatgtttctttttatgctgagtaaagaatttaagaacataaaaggcaaagaaaaagaaaaagaaaaagacccaattaaattacaaaaaattcgtttagtgagtagacgaatttttcaagtgatggcatggggcatattgttttcattgtttttgaacttagagtggggattttatgtattgcttagtataataagctgtggatctatgttgtttatgttatatattttctattcatacataatagaaagctatgaaacttaaaaaagagtcttctcattatgagaagactcttttaatctatttacttcgtaataaattgttgtgtccagtagttgccgctttctacataaccaacaccgatgtgagtgaagccgttatttaaaatgtttgcacggtgtccagcgctgttcatccaagcttgtactacttcttcaggtgtacgttggccttgagcgatgttttcacctgcagatgtataagaaataccaaatttcttcatcatatcaaacggagatccgtatgtagggctgttatgatcaaagtagttgtttttttgcatatcttcagacttaatacgtgctactttgcttaattcagtatcgatttttagtgctggtaagccttgttttgcacgctcagcgtttgttaattcaacaacacgttgttcgaactcacttaaagattttgcttcttcagcaggcttttgctcagctggtttttgttcagcaggtttttgagtattgttgttttcagcaggtttttgagcttctggtttttgaacttcttcagcaggcttttgctcggctggtttttgttcaactggcttttgagtttctggcttagctgttggttgctcagttacaacattttcagtaggttgttgaccaggaatgaagcagtttggttggaagtttccttgttgccattgtgctaatgattcaactcccatagattgtaagaatgcttgtaattcttgttggttcatttgtttcatcatcacttttgaatgctgaatattttgaacctttacgttagatggttgtactgttgcagcttgtgcatctagagaagatactcctaaagtaagagctgttgcagcagctacagataataaaacacgctttttcatgatgtgtgtccccctatataaagttttaatttgttttcacacgatttgtttttgacagcctgtctgactgacaaattcatcgtagcatacaatttgcgagaaaaaagatggaaaaaaattcatagactttaaaattacctaatttatcctaagagaagaagggagcaaaaataagagaaatatagagtataaaaggaatttatagtgtttttatacttggttttaagagggggtttttggataaagttacctaaatagaaaatgaagaatcctattgtatcaatggtttgaacgattttttgaggaatataatggattgatttttacaaaactgtaatgtttctgttgttcttttttataataaagtaacatatttttaatgttgtagcagacaaaaaagcggctatctctttacatagacgaaggagatagccgttttcctattattacgtatgttacgagttattacgagttagtttcaattgcttctaataataaatccacaatgtgaattcctctcattttatgagaaagcccttctcgctcaatgcccaatttcatttgtaataaacaacctggatttgcagtaacaatggttgctgcttctgtttcatgcacacggtccattttgtaatctagaaattccattgataactctgaatgaacaatattgtaaataccagcagagccacagcaacgatcggcatctttcatttctcgatatgttgcaccttggatagcctctagtaacatacgaggttcagaagatgtgcgcataacattgcgtaaatgacaagagtcttgatacgtaataacttgcggcgtgagtcgtaagtcagttcgcttatggaagtctagttctactagtatagcagtaatatctttaatcttagaaacaaactgcttagcacgttcagcccaatccggatcatcctttaaaagataatcatagtctacaagataagccccgcaaccacctgcattggtaataatatagtcgatgtttaaatcttcgaatgcttttatatttcgctttgctaattcttttgctccactcttttcaccagcatgtccatgtaatgcaccgcagcaactttgtgtttttggaataacgatatcacaaccagctagttgaagaagtttcatcgttgcgttatttgtttctaaaaacatcgtatccattaagcagcctgtgaagaatgcaacttgttttttctttgtactttctgcaggtaaaaatgaaggacgatctttcatcgctttcattttagggacttttggtaaaacgagatccatcgttgcaagtgtttcagggaataacttcataatccctgttttatgtgttagcgtttgtaaaccagaacgttgataaaatccgattagtccagttaatgttctcattcgattttgatgggggaataatccttcaaaaacgacttttcgaacagctttcactggcaccgagaattttttattttgattaataatatcacgagcttcttctaataaatggccataatttacaccagatggacaaacaggttcacaagcacggcaaccaagacaaacgtttaatgtatcttcaacatcttcatctggttcgattaaaccatcaacgacagctttcattaatgcgatacgtccgcgcggtgaatgtgactctttatatccggattgaatgtaggtaggacaagtaggtaaacaaaaaccgcatcgcatacagtttagtaattcatcttcacttaatcgttctttaaattctttttgaatattttctttattcaatgtcgtcatcgctcaaccaccactctttttcgagtgtctttcgcgaacatttttccaggattcataatgttatttggatcgaaagcttgctttattccttgcatagctgcaataccttccttacctaatttcatttctaaatatggagctttcatcgcaccaacaccatgttcaccagtaattgtgccaccaagttcaattgctttcgcaaatatttcagcaaaagcttgttcagctcggtgcatttcttctgcattacgaacgtctgtcatacaagttggatgtaagttaccatcaccagcgtgcccaaacgtacaaataggaatattatatttttttgcaatggtattaatagcttcaaccattggagctatttgtgaacgtggtacagttgcatcttctaatattgtagtaggttttaatcttgcaagcgctgatagggcactacgacgagcggtacgaagcgcatctgcttctgtttcatcttttgcaacacgaacatcaaccgcattcatagagtgacaaacgttagccattttttcaatatctcgattgactacttcgggcggaccgtcttgttcgattaataaaattgcttttacatctgtaggtaaaccgatttgtgcaaactcttctactacttcaattgtcggttggtctaaaaactccagtgttgctggaatgattttatttgcaataatagaagaaacagcacgtgcagcttcattaatatcttcatataatgcaagcattgttttctttgtttcaggcataggaacaagttttaatatggcttctgttacgacgccgagtgttccttcagaaccgataaataaacgagttaaatcgtaaccagctacatcttttgctaatttaccaccagtgcgaataatatcaccatttggtaagacaagttcaagccccattacataatcacgtgttacgccatatttcaaaccgcgtaatccacctgagttttcattaatattaccgccgattgtagaaattttcatcgagcttggatctggtggataaaataaacctttttcttctaccgctttaataatatcaagtgtaatgacaccagcttgtacagtaattgttaagttttcttcatcaatttctaaaatattgttcatatggcggaaaataaggacgataccgccttcaagtggacatgttcctgcgcaaagatttgttccagacccgcgcacatacacagggattttgtaagtgttacatacttttaacacttcagctacttcatttgtattacgaggagcaatgactgcatcaggcattgcttggaagtttggagtggcatcataactataagttaaacgccccatattggatgtatctacattatcttcgccaacaatagatacgaatgaatgaataatttgtttttctaacattggaaatccccctcaaactgttaacgtgtttagttataataaacaacgtggtaacagtgctttcattataatgataaaaaagtcgagggattctttctatgtataatcatctaaagattaatctgttttatcgttcttttttgtatgattatctaataggaggagtgcgaagtataaaacgtttaagtctttgaattgttttggatcaagtcctgtatgttcttcaatcttttttagcctataatgtaaggtgttaatgtgtatatgtaattgtttagctgtctgtttataagattggttataatcgataaataagcgtaaagtgtgcataagctcaggagatgatagtaagctttcgatggtacgctctagaaattgttcacgcgtttcggcagaaatatcttgtaaacacatttctaaacgtaaatcttcattaaatacaatttttttcgtttccaatgatacagaaagagcacgtaatgcttgttcgtaacatatgttcatattgtttggggtaactgtttgcccaatcccgatatataaaggaatagaaaataaagcttcgcagtcttgttttaaccgttttaaaaactgataagtttgttctttggagctcatcgctgtaaataaaataaaacgatcatttccccagcgaacaaatagatgctcttttgttaaaatatttcgtacatgttgccatattttacgctggagcattgtgtcatttttgccaatagaaaacaaaacaagttgttttttcttatataaatcaatgccaagtgttttggcacgatcaagaaaactcggggaccactctgtattttgaagccaatcaaagacaaaagcttcataagaacggtgctcaagttctaattgctctaaaaagtagttttcatgaattaataattcggtcatcttacgcaatatttctccgtagcgtgaaatgttttcaggttctccggtaatcccaatgacaccgattacttcatcatgaaataatagaggaagattcatcccagcctttacaccttgcaatcgcctttcatcttcttttgtaatgatgacggttttcttttgtttagcgcagcggagtgcaccttcatgaaattggccaattctttctgtatctgtacttgcgataataacgccttctatattaatgataattatattttctgtaattagtctgcgtacttctcgtacaattttattcgctaaatcaggaaatagcataattgacacacctcaaattctatttgttgtacattatatatgtaaattgagtaagaaaggggaatttcacactttccacacatttatttgttattttacaattataacgaaatcatctgaaggtggagggaatcttttgagaaagtatgtttttcttctctgttttttatttctattagtagggtgtcaaggaagttcatatacaccaattgctaaagataaaaatgttattataactacgaatataaaagaaggcagtattagttttattgataaaaaagataaaaagttaattacgacatgggaactaaatgagccaatggctggaatcacactgcttccaaatggcgatgaaatacttgtatacggtaagcaattagaatatatgtatgtatattcactagcggaaggaaggcaagtggaaaaatataaaactggaaagggcattgtaaatgtggtcgtatcagcagataaaaaacaattatttgctgctgatcaaaatgttcaaaaggtaaggttctttacgataaatgggaaagagacaggaaatgtttcaacaggaaaagggcctataacgatggtagagtatcagaatcggttatctgtactaaacttttatgatacgaaactaacgacaattgatacgaagaaaaaagaagttgttcaatcctttatgattccgccagcatcaacaggagcgacgattagtcctgatgggaaagaaatatggattggcgggcatggtgatggaaatcaagtgaatgagaaagtattagtgtattctttacagagcggtgaaatggtacgttctttacacgctccatttatgcctgtgaacataacgaaagataataagtacgtatatgcattaagccacggttcgaatatgcttagaaaatttgatattagtacgtataaagaggtagcttccgttgaaataggctcaaatccatttgcatttttgaaaagcggagcagaaggatatgtagcaagttatgatagtgatgaagtgtgcgtcatggatatgaagagtatgaaaataaaacaaacaattaaagtcggaaaaggaccgtttcaactcatagagagggaagggaaggacaatgaataaatatagagtgctagttgtagatgatgaaagtgatatgaggcagcttgttggaatgtatttggataactttggatatgagtggggagaagctgaaaacggaaaagaggctcttaaaaaactagaaacggatcattatgatttcgttgtattagatataatgatgccagaaatggatggactttcagtttgtaaagaaattagaaaaacgtcagatgtgccgattatatttttaaccgcaaaaggtgaagagtggaatagggtgaatggcttacgtatgggagcagatgattatattgtaaaaccgtttagtcctggtgaattggttgcccgtatggaagctgtactaagaagatatacaaagcaagaacagcaagaagagattcaatttggaccaattcttatcaatgaaaaaagcagacgaattgaggcgaatggtgagtcgatttctcttactgtaaaagagtttgatttactatattttctttgtcagcatacaggacaagtatttagccgggagcaattacttgaaaaggtatggggatatgattatgccggaagtacaagaacagtagatacgcacgtgaaaacgatgcgcttgaagcttggagaaagtggaaactacattcaaactgtttggggtgtaggctataaatttgaggtgtaacatatgtttacgatggtacaaaaactttggcttacagtagtatgtgcagtatgtgtaacagtgtcctttctttatttcgtatctttatactcgtatgaaaagttatacgttgataatttaaaaacttcgttagtaatggaagggaaaagtcttgctgctcaatatgataagcgtgaaggaatatcaacttttgaagagaaagtaagatcgtttgatcaaatatctagttcagacgttattttcgtatctaatccgcgtgatttaagcgcatgtttgccttttgatgtgcatcatcattctcttataagtgaaggagataggcaaacgctattagatgggaaaactgtgacaaaaataggatatgaagaacattttgaacgtaatattatgggggttgtcattcctgtattggaaaataaaaaattagtcggaattgtctattcgtatattcctttaaaaagtataaaagatttaatctatgatatgggtcttattttagcaccgctagcaattgctatgattttaattacgatatgggttggaagaaaaattataattgcaattacgaagccactttcgcaaatggagcgggttgcaaatcatttggctacgggagatttttcggagcggattacagtttcttcagaggatgaaattggacgattaggaaaagcatttaataaaatggcaaattcattagaaacagaagatgtaaagcgtaaggaatttttagcaaatgtttcgcatgaacttagaacaccacttagttatataaaagggtatagcgaggctattttagatggtgttgcaaagggagctcagcaggaaaaagtaactcagctaattcataaagaagcaggtcgtatgcagcgtctcgttcatgacttgttagacttagcacaattagaaggtgagcactttccgttaaagaagcaacctatcgttttttcacagctgattgaagacgtattagatacgtatgagattaagtttatagaaaaggaaattcatatttcaaccaatttaaatccagaggtcattgtcatgattgatgaggatcgtatgcaacaagtgcttcataatgtgttagataatgcgatacggtatacaaatcaaaaaggaaatatcgttataactttagagcaaatcgatgattactgtgaattaaaaataaaagatacaggaattggcattgatatagagcatttggagaatcttggggaacgcttttaccgagttgataaagcgagaagtcgtcaacatggtggaacaggtttaggccttgctattgtgaaacaaattgttcatatacatggtggacagtggaaaattgaaagtgaaaaagataagggaacaacggttattattaaactgaatgtacaggatgagggggcatgttctaatttttagggcatgttctttatattgaagaaaatatttatcccgctattctccggtcagtaagaccctcacctcaaaattcagcggaagcaaagaagttaggtggaggcactgctgcccgtaaaagcccgattggtgagggctaataatcagtgggggatgaacaaaaccctcactgattaaagtttcactttatacgtaaaaatataaattaatatgtaataaatatcgaaaatttgactattttatgaacaaaacatttgtacttcttatcaattcggtctaaaatagttatgatgcaaagttcttataaatcgtttcaattgttgtttggaagatactgaggtgatttaactggagtacaaatctattaaaccgaaaaaaatttacgaagaagtatctgaagctattttaacaatgattaaaaatggtacgttaaaacctggtgacaaactactccctgtgcatcaattagctgagcagtttcaagttggcagatctgctgttcgtgaagcgctaagtgcgctaagagcgatgggcttaattgagatgaaacaaggagaaggtacatatgtgaagaacttcgattcttcttcattaacgaaatcattaaacaatagattattaatgaagaaagaagatattttgaatttattagaagtacgaaaggtgcttgaagtgggggcagttcgagtagcggcggcaaaacgtacggaagataatttacaaaatatgaaacattggttagatgaaatggcaaagagcattggagatgaaaaggctggcgaaaaagccgattttcaatttcatatgggaattgcagagtcttcgcataatagcattttgcttgaactcatgaatcatgtttcagagatgattgctgaaacgattggtgaatcaagacgcattattttatatggtgaacaaacgacatcagaacgacttatagaagagcatcaagttatatatgatgcggtgttaaaacaagatgtagaattagcgcagcaagcaatgctagatcacttaacaaatgtagaacatattgtcacaggtaaaaacgatataaattcgtaatttaatcttttaaaaatttaattttctgataaaatagagaaaggttaagtaagcgttttctttagaagagggagaggataggccatggttgagcctatttcttctctgctaagtcatctgatgaccatatgtttgttggtgaagttgtaaaaagggggagtaatagttatgaaagttactttatttgttacttgtttagtcgatatgtttgaaacaaatgtcggtaaagcaacggttgaagtgttggagcgtttaggttgtgaaattgaatttccagaagcgcaagtttgttgtggtcagcctgcttataatagcggccatgtagaagcagcaaaagaagcaatgaaacatatgattgaaactttcgaagatgcagaatatattgttacgccatctggttcttgtgcgacaatgtttcatgagtatccacatgttttcaaagatgatccaaagtgggctaaacgtgcacaaaaagttgctgataaaacttatgaatttacacagtttattgtggatgttttaaaggttactgatgttggtgcaagtttaccaggggtcgctactattcataaatcatgtcatatgacacgtatgcttggaataaaagaagcaccaggaattttattatcaaatgtaaaaggattaactgtgagagatttgccaaacgtgcaaaattgttgcgggtttgggggaacgttttcagttaagatgactccaatttctgagcaaatggtagacgaaaaagtagatagtgtaatggaaacaggtgcagattatttaatcggtgcagattgtgggtgtttgttaaacattggcggacgtattgagcgtttaggaaaagaagtaaaagtaatgcatattgctgaggtactgaatagtcgctcatgaagggggaacataagctatgtctatgaaaatcagtgagaaaaaatttaatgatcgcgttggtgatggaattcaagattcgtttatgcgcggagcagtatcttctgcacaaacgcgtttatatacgaatcgcttaaaagccgcagatgaactaggaaactgggaagagtggcgtgaactaggtgaacaaattcgtcaacatacgttagaaaatcttgattattacttaatgcagttaagtgaaaatgtatcaaaaagaggcggacacgtgtactttgcgaaaacgaaagaggaagcagcaaagtatattcaagacgttgcaaaaaagaagcaggcaaaaaagatagtaaaatcaaagtcgatggtaacagaagaaatcagtatgaaccatgcgcttgaagagattggctgtgaagtgttagagagtgacttaggagagtatatcttgcaagtagataacgatccaccttcacatattattgcacctgcacttcataaaaatagaacgcaaattcgcgatgtatttaaagaaaagctaggttatgaaaattctgatgacccgtatgaaatgacaaagtttgttcgtaaacaacttcgtgagaaatttatggatgcagaaattggtgtaactggttgtaactttgctgttgcaaatactggctctctttgtttagtaacgaatgaaggtaatgcagatcttgttatgtcaattcctaaaacacaaatagcggtaatgggtatggaacgtatggttccgacaatggaagaattagatgttttagttggtttactatgtcgtagtgcagtaggtcaaaaattaacaagttatgtaacagtagcggggccaattcaagaagaggaagttgatggacctgaagaatttcatttagttgttgttgataatggtcgctctcaaattcttggatctgaattccgttcagtattacaatgtattcgttgcgctgcttgtgttaatgtatgtcctgtatatcgtcacgttggtggacattcatatggatcgatttactcaggaccaatcggtgcggtattaacaccgcttctaggtggatatgatgattacaaagagcttccttatgcatctagtttatgcggagcatgtacagaagcttgtccagtaaaaattccattgcatgatttattattaaaacatcgtcaagtcatcgttgagcaagaaggtcgtgcaccacttgcagaaaaactggctatgaaaatgtttagtatgggtgcttcttcagctgctttatataaaatgggttcaaaaatggcaccagcggcaatgagtccatttacatctggtaatcgtgtatcaaaaggtgttggaccacttaaaaactggacggatattcgtgaattcccagctccaagtaaagaacgattccgtgattggtataaagatcataagaaaggcggggataaataatgacaggattaattcaaaaccgtgatgcctttctagataacattgcaaaagaacttgggcgcgcgcgtaaaacagaaggtgtagagcgtccagtatggaaaagtaatgtgaatatagaaacgttaaaagattattcacaagaagaattactagaagtgtttaaagagcaatgtacaaacattcatacaactgtagtagaaacgacaaacgaccgtttaggtgaagaccttcaaaaagtaatcatggaaaacggcgggggacctattttattatcagcagatgcgcgttttgatgcatatggtttaacatctttatttaaagaagaacttccaaaacgagatgttgaagtaaatgtatgggatccagagagaaaagacgaaaatatgcgtttagctgaaaaagcgaatattggtattgcatttagtgattatacattagctgaatctggtacaattgttgtacaaagtcataaaggtcaagggcgttctttacactttttaccgactgtatattttgctattattccacgtgaaacacttgtgcctcgtattacacaagcagttcaggatatgaactcacgcgtagaaaatggggagacagcggcatcttgtattaactttattacagggccaagtaactcggctgacatcgagatgaatcttgttgtcggagtacatggaccattaaaagcagtttatttcatcgtataaaagaggggaaagcaggccaggaaatggcctgctttttagtagaataaaggataatatgaagtagaagttctctcctttttttgctatgttttttgggaaaggagaggaagggatgttcacttatttatatgcactgttagcagggatggtgtttggttctttttttatgctagttgcgatgagggttccattaggtgcttctattattaccccgcgttcacattgtgattattgcaaatatgtgctaaggacaaaagaactaatccccatcatttcattttatatacaaagaggctgttgtacgaattgtaagaggaaaattccaattatgtatgtagcatttgaatgtataacaggaggtatatttcttcttacagtgtatatgattggaatagaacgagagcttattattattttatcccttttttcgctgcttcttattatttcagttacagattacttatatatgttaattcctgattgtattttaatttcgtttgcctttttactcattctcgaaagtgtttttgtacaattagttacttggacagatagtatagctggtagtggtgttatatttattttgttatattgcatgcaaaagatatatccagaagggcttggcggaggagatataaaactactttcgttacttggatttatagtaggagtgaaaggagtttttatcgttttatttttagcatcttgttttagtctttgttttttcgggattggtatcggattaaaacgtatagaagtacgaaagccaattccatttggtccttttattagtctcggggcaatatgttatgtattggccgcatattcaaattagagagggaatcgaaaatgaacgtatatatggatgatcaaagaagttgcccgttcgggtatgtgcccgcaactacagtagaatgtgctttgcaaatggttcaggattatgatgtgaatattctttctcttgattttaatatgggatggggagcgaaaaatggactggattttgtagaagctttttgtacagaggggttatatgtaaatgaaattcactttcatacgaatgatgtcatcggtatgtacaagatgaaacagagaatggataagggaaaggaagaaggagaaattactcctcaccttgttattaaatacgtgggaagctaaaaactccaaagtaaaactttggagtttttaatgtttcatatgggcttgtaaaggaataatctcttcttgttgagctgttgcgatttcagtttcttcctgttgaacttcaggggttttctttgttaagtagtggtataccataccgacaaatactgatccgccaataatgttaccaattgtaacaggaattaagttatgaatagcacctgaaaaagaaattgtctcaggatgcggtgaaactaaagataaagcaaagagtgataagtttgcaatactatgttcgtaaccagataagaagaatgtgaaaacaagtagcatcatgaccattatttttgctgtgtcacctttaacctgagaaggtaagaagcaagcaagacatacgagccagttacataaaatggctttaaagaataactgcatcgtaggtgtattcatctttccttcaacgactttactcattaagtgaccgtgatcaattgcttcaaaaattccagttgcgtaaaatagtaaggcaaagaataatgcgccggctaagttacctgcataacaagcaacccagttacgaagtgtatcagaaatcgttgtttcttttcttaaagttgcgacagtaaagtacattgtgttcccagtaaacaattcagcaccgccatatataataagtacgagagcaatcccgaaaaacatagaagcggctaaataagttgctggtgaatctgcaatgtgaaaaaagttacctaatttaaaacatagtacaataataaaaccgatataaataccagcaagtgcagcacgaatgaaatattgcattgggtttgtatctagtattttctttttgcttttagccagtttgacaacataatctagtccttgttctagcatgagtaatacgctcctttagtaaatcttctataaatactccttatatgaataaagtacatggaattgttcttactttcaataagtttgtgcaatgtttcacaaaaaggacatacatacattaagaaaacgtttacaaaaggtagtataatggaattttttctggacattgcgaggaagaaaggaaaaagaaaaagcgctgtaattacagcgctttttcgtctaaattcttttccacttttacttctacttcttttgagaagaaccaaccaccaactgcgattccgactaatacaatccagaatgtaagcttccacggagtggattctgggaatgaatgtggaattacatttaatgcaggatgtgctaatgtataaactgctagcttcacaccaacccaacctacaattaagaatgctgcagtttcaagccctggtttacgttttaagatttgtacgaaagcagttgctgcaaatcgcataatgattaatccgataagtccacctacaaagataacaacgaattgcccagtatcaagactaccaattgtacctagtcctgtttttggtaaagtcattgctagtgcaacagcagctaaaattgaatcaactgcgaaggcgatatcagcaacctcaactttaaatacagtccaccaaaagttctcttgttttttctttgcttctttttcttcagtttcttcatctgtattctttttaacatatgttttaaataagtgattaccagcgataaacataaggtagatggcaccgattgcttgcacttgccatacatcgactaagaacgaaatcataaataacgatccaaatcggaaaacgaatgcccccgctaatccgtaaaatagtgctttctttcgtttttcttctggtaaatgttttaccataattgcaagaacaagagcgttatcagccgccaaaatcccttcaagtgcaattaggatgagtaatacccaaccatactccaataataatgatacatccatgtacattctcctctcatctctataacttctaaataagtgaagaatttccccactatttagtttccccatactcctgcctattaactttgggagaatctggaaatgaatgcaaaaaagacctctgccgttaataggcaaaggtcttgctagacatatgtaataaaaatgccaacaaagccggaagaactaagttctacgtaatgacgactttgtttccaagatatattcttggacgctactcccctttggagatatgttattgtattctcattatatggataatttatacggttgtcaacctgttaaaatatcttcattcggatattttatttttcggttctttttacgagcaaatgaaaatgccaatgttaaaggacccattttcccaaaaaacatcataaaaataataatcgcttttccaattatagttaagtggggtgttaagttcatactgaggccaacagtcccaaatgctgaaaatacttcgaaagcactcatcaatagagaaactcgttcagtaatactcaaaattaaaatagcaaaaaagataaatgaaatagaaataatagtaatggttaatgatttgacaatgagagtatctttaatggattttttaaatacgacaatatcttcttgttgttgtaaaaatttaaatacgccaaaaaatatgattaaaaatgttgttaacttaatccccccacccgttgaagcactaccagcaccaataaacataagtagcatcattaatagcagggaaggttttgacaatgtagaaatatcaactgtattaaaaccggcagttcgcgttgaaattgcttggaaataagaggccattccttcttcaaatggggtaaaccctctcatagaaagggagttatggaactcgaatataaaaataaaaagggtagcaataatgttgatgattagagtagaagagagcataagttttgaatgtagtgtaaggtttttaaagtttttctttctttttatgtctacgatcactgtaaaaccaattccacctaaaatgatgagagaggaaatgacgaaattgacaataatgctatgagaatgggacattaaattatcgctccacacagaaaaaccagcattgttaaaggctgagattgaatggaaaaaactataatagatccctttggtaaccccgtattttggtacccaatcaaaagaaagaattaaagtagcgatacattcgactgtaaaagagaataaaaataatgctttggcaagacggatgacgccgcctatattcgtttgatttaatgcttgttgcagtaaaatccgattttgaagaccgatttttcttccgagcataatcgcaattaagacagcaaagctcataataccaagcccgccaacttgtataagcgttaaaatgatacattgtccaaacaaagtaaatacttttccagtgtccacaacaccaagtcctgtaaccgtacaagcagaaactgttgtaaataaagcatcgagccatgaaatagacgttgttgtagcaattggaagctttaataagcatgtacctataattgataacatgataaaagacaaagtaagaacgcggggaggactcatacgaatgttaatccgtttcatgttatatatcgttcctttctgtttgctcttactagtatgtgaaaaagtccgattatgtatgtgaaaaatagaaagaggcagagaatatctgcctctaagccatatgttatattattatccacgtaattgttgttgagctaaagaaacaagacgttttgttacttcaccgccaactgatccgttagaacgagatgctgtattagaccctaagcttacgccgaattcttgtgcaatttcatatttaaattgatcaagtgcttgttcagcacctggaactagtaatttgtttgtttttgccatgatgatacacatccttatgagtaatccagtccagataagtacttatctgaattggtactgttattttatgtggaaccggcgtgctcatacgcggaagtaatcggtgtgattagaagttattggatagaaaaaagagtagcaaatttgctactctttttttagtattgtcgctgtaccttccacgacaatatcatccgattgattatatatatttgtttgcaacgtaatgatttttttatcgtcacgcttcttaataacctctgccacaacgcgaagtgtatcaccgattttgacaggggcacggaatgaaacattttgggataaataaatcgtatttttgcctgggagtttcgttccaaggatggtagaaataaaactcgaaacgagcataccatgggcaatacgttctttaaacattgtcgttttcgcaaaagaatctaaaatgtgaataggattcacatctccagtcaattttgcaaaattgataacatcttcatctgtaattgtttttgtaagggatgcttgatcaccgacttgaatctcatcatagcgaagctccggaacagtttgtgcttcttgaaatggattcattttgtcctccttcttttccatatcgaaaaatgttagccatcttgatgtagtaggaggaagaaagagttttgtttgtgctgcggttagctcccacatttttcttacttgatggaagtaaatagattttttgagttttcctcgaacttttttgcgagttccaactgttttgacttgaactcttccaaaaaaccctctaactgtttttgagcctcttcacgttgtaattgttgttgttcaataaattgttttgttgtttcttcaaattgaccgcttgtttgtgtaagaattgacaaagaagtttttgtaggagaaacggtaagctgatgcatatgagcagaaagttctttccatttgtcttgccactcgttaatttgatcatttaaggagtttccagttaattgtttcacgtaatctgtatattggttattgaactgagcagtgagttgttgtagttctttttctagttcatctactcctgatgttaacttatgcaaagcgtcttgttgttgttttaatgtttctaaagtaagttgctctaactgtttcccagctgaagagaaaagggaaagtgattgagaccagtttttccaaaatgcatcgactaattcgtatggtttagtttccattgtttgacccccaaatgtttttttgcatattgtgaacgcagattactctgctgtaccaccaggtgaagatgaagaatccttttcatccttttctggagaagtagaaaatggaaagaatgcattggtgtataacgtgaaaaacgttcgcaacatattttgataatgttcaaaagaagtcgcacatgttgttaaatattgctctccatattcagttaaagaataaattctttttgctggccctccatcgcttgtatcccaagtagaagaaataaggttttctttttctaacttgcgtagtgttctataaacattaccttggtcaacagaagaaaagccgatatccattagcatttgaataagtttgtaaccatgaagactccagtcttttagacagagaagtaagaagggaactaagaagttttttggcatggagtttggttgtttcgcttggttgctctccaaactttcgcgttgttctggttcattttgtagcatgattgtgcatcacctcatgaatcagttagatggaattttttgcttataagtgcaatttacacctatctgtttttaaagtcaacacatttgttagaaaatagaaaaaaataaaatatagacttgaagttttattcagaatattagaaaatagtgaataggttgaattgtttcaaaaacgaaaaaaggagtgtaggtaaagtgattgatcaaaaattcgatccactacaagcatggaaaaatgcttatgaacaaaccgaaacattttggggaaaagcgctcaatgaaacaattaaaacagaagaatattctgcttggatgggcagcgttctagatttgaatttgttttatcaaaaagcattaaatgatacgacaaaaagctatttagaacaagtaaatgtgccgacgaaagaggatatcgcaagagtggctacgcttgttattaacttagaaaataaagtagataacattgaggagtttctagaggagaaagtagattctttaggacaagctcctacattaaagcgtgatgtgacgaaagtaaaacaagatattcgtacgcttgaaacaaaagtagatcaaattttagaattgctagaaaagcaaaatgcagaactagctaaactacaagtacctgtaaaagaagaggtaaagcctgcgaataaaccagaaaataaaaaatgataaaagcgcttgtttataacatgtaaaagagagagggagaatctcttttcgtgtataaacagcgaaacataattatatatggactctatagtatgagtaccaaaatgattcataacaatcgttcacaaattcatttaagggggaaaagaaatggttcaattaaatggaaaagtagcaatcgtaacaggtggagcaaaaggaattggaaaagcaattacagtagcattagcacaagagggagcgaaagtagttattaactataatagcagtaaagaagcagctgaaaatttagtaaatgaattaggaaaagacggacatgacgtttatgcagtgcaagcggatgtttctaaagtagaagatgcaaaccgacttgtagaagaagctgtgaatcattttggtaaagttgatattcttgttaataatgctggtattacaagagatcgtacattcaaaaagttaaatcgtgaagattgggagcgcgtaattgacgtgaatttaagtagcgtatttaatacgacaagcgcggttcttccatacataacggaagcagaagaaggaagaattattagcatttcttctattattggtcaagcaggtggatttggccaaacaaactactcagcagcaaaagcgggtatgttaggatttacaaaatcattagcgttagaacttgcaaaaacaaatgtcactgtaaacgctatttgcccaggatttattgatactgaaatggtagcagaagtaccagaagaagtacgtcaaaaaatcgttgcaaaaatcccgaaaaaacgttttggtcaagctgatgaaattgcaaaaggtgtagtatacctatgccgtgacggtgcgtatatcacaggtcaacaattaaacattaacggcggattatatatgtaatgaagtaagaaaaaagtgcatatccatagcaggaatgcacttctttttttagaaggaaatcgaccaaaaaggagatagaaaaatgactacattcgcaacagaatgggaaaagcaattagagctatacccagaagagtaccgaaaagcataccgccgagtgaaaagggcgagtgaaattttattacgtgaaccagagccccaagtcggattaacgccgaaagaggttatttggacgaagaataagacgaagctttatcgctacattccaaaacaagaaaaaacacaaagagttccaattctattaatatatgctcttattaataaaccatatattatggatttaactcctggaaatagtttagtggaatatctagtggatcgtggttttgatgtgtatatgcttgattggggcacatttggtttagaagatagtcatttgaaatttgatgatttcgtgtttgattatattgcaaaagcagtaaaaaaagtaatgcgaactgcaaaatcggacgagatttctttacttggttattgcatgggtggaacgctaacttctatttatgcagcacttcatccgcacatgccaattcgtaatttaattttcatgacaagtccttttgatttctctgaaacaggattgtatggccctttattagatgagaaatacttcaatttagataaagcggttgatacatttggaaatattccgccagaaatgattgatttcggaaacaaaatgttaaagccaattacgaactttgttggtccatatgttgctttagtagatcgttcagagaatgagcgcttcgtcgaaagctggagattggttcaaaagtgggttggtgatggtattccgttcccaggtgaatcatacagacagtggattcgtgatttttatcaaaataataagttggttaagggtgaactcgttattcgcggacaaaaggtagaccttgcaaatattaaggcgaatgtcttaaatatttccgggaaacgtgatcatatcgctttgccatgtcaagtagaagcattactagaccatatttctagcacagataaacaatatgtatgtttaccaacagggcatatgtctatcgtttacggtggaacagctgtaaaacaaacatatccgacgattggaaattggcttgaagagcgttctaattaaaaataaaaaaatccaactagcctatgttagttggatttttttatgaaaaataacaaaacatagaaaggagaaatttatattttaggagtataattatgaaacttatgatgggtaagttgttttggaatacaggagtttctgtaccttgttatccactgttagaaaatgatatgatatgtgatgtgctcgtagttggaagcggcgaagccggtgctcatatagcgcattcgttagcgaaaattggcatgagtgttacacttattgaaaaaagagcaattgcgtgtggtagcacagctgctaatacaggtttactacaatttcttcatgataaatcgttaacctctcttatccatacatttggtaaagaaaaaggggtacgagcatataagctttgttatgaagcgctaagaacaatggaagaggttataccgactcttgatattaatccccattttattccgcgaaatagtttatattatgcaagtaaaagtgaggatgtctcatttttacaagaggaatataatacgttacagaattatggatttccagttgaatattttacagaagctgatattaagaaacgttattcttttgcaaaacaagcagcgttatatacgcaaggtgatgctgaggtgaatccgtatttactagcgtatagttttttgcataaagcaaaccaaatgggagctaatatatatgaacatacagaggcaatacatataaaaaaacgcaaaaatgatttaatttgttacacgaaaacaggaaatcaaattgtagcaaagaatattattatggcgacaggttatgaggcgctttttggaaagaaagaaaaaaatacaacagtagacacctcttatgcaattgtaacaaatgaaatagatcaatttgaaggctggcatgagcgatcgttaatttgggaaacggcacggccttacttatattttcgaacgtatcgaaaccgcattattgtaggcggattagatgaagcgctacaaattcaaacaattggtgatacgaaattattgcataagcgtgatatccttattaatattgtaaaagagatgttcccgcagtataaaaatatacaggcagactactattgggcagccgcatttggtggtactcatgatggtctccccattttaaaagaagacgaaaagatacataatttgttttatgcattgccgtatggaggtaatggaactgtatatggaatggtctttgccaaattatttgagcagttatttacaaataaagaaagtaaagatttttctttatttaatcgatagaaaaaaggtagcgaagtgatggaatgagagatataaaaaagtttttacaaaaattacgtcctgtacaactcatcgttttgttttatttattagcggtagttgtatcggtgatattgcttagtttaccgtttgttacgaagcctggtgtgaaatggacatttatagatgcgctttttacatcggttagtgcggtaagtgttacgggactgtctgttattacgatttcagatacgtttactacagcaggaattattgttttagcccttattttacaattaggcggcttaggaattatggcgcttgggacatttgtttggatcattacggggaaaaagattggtttgcaaagaagaagattaattatggcagaccataatcaaggaaatttatcgggtctcgtagaattgatgcgttctattttaattgtaattatttcaatagaacttattggagcaatcttattggggacaagatttttactttactttccgacttggcaagaagcttattttcacggtttctttgcagctgttagtgccactacgaacggcggatttgatttaacaggacaatcattaattccgtataaaaaagattatattgttcaaatgattcatatgttactaattattttaggagcgattggtttccctgtgctaatggaagtgaaacaattccttagtaaaaggagacaacaattattccgtttttcattatttacaaaattgacgacaacaacattttttgcactcgttgttgttggtacaattatgatttttttactggagagaaatcattttttagtaggaaagtcatggcatgaaactgtattttatacattattccaatctgtgacgacgcgaagtggtggacttgcaacaatggatatacgtgaattatcacaaccgacgcttttatttatgagtatattaatgtttataggggcatctccaagttcggttgggggcggaatacgtacaactacatttgctgttagtatattgtcactatacacctttgcaaggggcggtagaacagttagagtcttcaaacgtcagctacatgaagaggatgtactgaaagcatctgtcgttatgacgatggggattttgttatgtgctactgcgctattcattttatctattacggaaaatgtaccgcttatgagcttaattgttgaagtttgttctgctttcggaacgacgggactatcaacaggtgttacgcctgatttaacaactgttgggaaacttgtacttattgtgcttatgtttatcggacgcgttggtattttaacatttattttagctagtggtggaagggaacaaccacctcgctataaatacccgaaagagcggattattattggatagtatgaaaccattctacctacgttaggtagaatggttttttagtcgttaatgccaaattgtggatgcataaaagcttcatttttattatccacttcgttttttagtaactcttgattttcttctgaaatccacccaatatcatttgtcggatggatccactcatcgccagccataatggcaggatctacttcatcactccaattgttaagcggactgttctcggaattatatttactgtctccaattacaacattatattgattcacaaaaggttgttgcatcgtttttcctgttcctttaaaagatggaaaattcatttgatgcgggagcgtttcgtctaaaatgggtgattgaatcttttcttttttcttcaaaattatcgctcctttttataatgatttcttcatatgtagtatttccatctaacgcctcttatgtacttgttaacacttgccagtaataattattttaagttgtttcaaactagagtagaaagtgatttcttgagagcaggtgaatgtattggtaaaaagaaaagtgaaacaaaatgcggcaatcaataataataaaactccgaaagaaagcttaccagatgcagaatttgcattagagtatgaaggagaaaatagcgcaaagtatgcgaatcgtaattcaaaaaaagggaaacaaaaatgaggcgttttttacaaacgcctcatttttttgtgggattataaaggtttttttaattatttgtaaatttagtgttttctattagcagaaaaatgcgaaaaaacatagaagtagcaacgtattacacaaaaacaaacaacaaacaaaagattaatgttggtttaatactgcttttacactagttgtttatatttgagttgtacataagatttgtaaaaggagagagaaacagtgaaaaaaacaatctttaaagctgtagcgactggaatggtattttcgttattaatggggtgtggtgcaaagaaggaagaaagtgctggagcgaaagtgaaagatgacaaattatctggatcattaactgtttacacagcaattgaagaagagcttgtaccaatttatcttgattcctttaaaaagaaatatcctgatgtgaaattgaacattgtacgtgattcaacaggagttattactgcgaaattactagctgaagggaaaaatacacaagccgatgttgtatggggaactgcggcatcaagtctattagctttagataaaaaagatatgttaaaaggatactctccaaaaggagcagatcgtgttcttccacaatttaaagatgataagcaacctgaaaaatgggtaggaaatactgcatttatgacggggattgctgtaaataaagaagagttaaagaagaaaaatttaccgatgccagaatcatatgaagatttaacgaaaccagagtataaaggaacacttgttatgccacatccagcatcatctggaacaggatttttaacagtttctgcatggctacaaatcatgggtgaagataaaggctgggattacatgaagaaacttcatgataatatggcaagttatacgcattcaggatcaaaaccagcgaaattagcaggagcgggtgaatatccagttggcgtatcaatggtttatagtgctttgaaagagaaacaaaaaggtgcaccagttgaagttgtattgccgaaagaaggattaggttgggaagtagaagcgaacgcacttattaaaaaagataatgcaaaaaatgaaaaattagcgcaagcatttttagattgggcgattactgatgatgtaatgaagttatacttcgagaaaaatggatttgcgacaattaaaaatgattataaacttccagatggattccctaaagatgtaacagaaaagttatacaaaaaaaatgactttaagtgggcagcagaaaatcgtgacaaaattttagaaaaatgggaaaaagagtttggccaaaaagcagaaccgaaaaagtaagtgagtgggagagagaaaaaatgagcgaatatttatcaattcaacacattcaaaaacagtttgatgcatttacagcgttaaaagatatttcttttactgtgaacaaaaatgagtttgtatgtttattaggcccaagtggttgtgggaaaacgacattgcttcgaattttagcaggtctagaagaggcaacaacaggtagtatagctgtgaatggaaaagatattacagcattacctcctggaaagagaaacttcggaatggtgtttcaatcgtatgcattatttccgaatttaacagcacttgaaaatattgaatacggcttaaagacaaaaaaatatggaaaagcagaagtaaaagagaaagcgctagaggcgttaaaacttgtagatttactgaatgtaaaagataaatatcctgctcaaatgtctggtggacaacagcagcgagtggcacttgcacgtgcgctcgctctgtctccagatattttgttacttgatgagccgttatctgctttagatgcgaaagtacgtgaaaagttacgtagagaaatgcgtgatttgcaagagaaagtaggagtaacaactattatggtcacgcatgatcaagaagaggcattaacgatggctgataaaattgttgtaatgaatcatgcggaaattatgcagattggaacaccagaggagatttatcaaagaccagccaatccgtttgtggcagattttattggttctattaatttcttttcgaaaaataacgaagagcatgcaattcgtcctgaacatgtaacaattgtacaaaaggacggtattaaaacagttgtggaaagtatggaatttcgtggatctgtatatcgaacggaagtgcgagtcgtagaagaaaacacacacctttataatgagaaaattgtagtggatatattagcatcagaagtagaagtagctgatattagaaaaggaaagccgattcaaatctctttctcagaaaatcatatgttgtcatatggaaagaaggtcattgtatagatggagatgttagaaaactacaaggtagaaagtgcgaaaaaaaagattaagagaagtatagggaaagaggaatggatccaaaggcttgtaattatcggtatgattctttccttccttgtcatacttgtattaccactattacaactatttacacaagctttttataataaagatggagttttcattggtttagcgaatttcagtaaatattttacaacaccaactttagttcagtctttacaaaatacggtatggatttcgggcgcaacaacaattatttcagtttcaattgcattcgtttacgcatatgcaattgcccgtacgaatgtttttggaaagcgtgtatttcagtatgtagcgttattaccattgtttgcaccaacgatgatgcacggtatagcacttacatatttatttggtaatcaagggctagtaacgaaaggaatgtttgggttatttgaaggtatacaaatccctttatatggaccagtaggaattgtaatagctgaagttatgtatacatttccgcaagcctttctcatattactaattgcctttcaaggatccgattatcgtttatatgaagcttctaatatgctaggggcgagtaaaacaaaacaatttttcacggttactttacctagtgtaaagtacggattaattagtgcaatgtttgttgtgtttacacttagtttcactgattttggggcaccaaaaattgttggtggacaatataatgtgcttgctactgacgtatacaaacaagtaattggacagcaaaatatgtcgatgggtgcaacagttggaatgattttattaatcccagctatattcgcatttgcagttgatcgtattacgcaaagaaagcaggcgaatttcttatcttcaaaagcagtaccatacagaataatagctaataagaaaagagatgtcatctcattcatatactgtagtgtgattacatttatgatcattctgttatttgtggcagttggtattgctgcaagtgtgaaagtatggccatataatatgagttttacatttgagcattttaatttttcgagtttaacaggagatggacttgaagcatttaaaaatagcgtaattgtttcagcagttacagcagttattggggcgattttaacatttgtatttgcatatgcaattgagaaaatagaccagctacaattcttccgaaaaacaggttactttttctctatcgttcctttagccataccaggtttagtactcggattaggatatgtctttttctttagtcaaccaacgattcaaattttgggactatcagtaacgaacccgtttcattctttatacggaacaatcgctgtgttagtactagtaaatatcattcatttttattctgtaacatttgtcacggcaacgactgctttaaagaaattagatcgagagtttgagcttgtttcgcagtcgatgggtattccgttttataaaacattctttagagtaacggtaccaatgtgtttaccagcaattttagaaatggtaatgtactacttcgtaaattcaatggtaactgtatcggcagttgtattcctatatgcagctgattttaaactagctgccgtatcaatcgtaaatatggatgatgcaggaaatgtggcgccagcagctgcaatgagtgtgcttattgttgttacaaatattgtagtaagagttgtatatgaatggggaacgaaagcacttcgtaaccgaacttcacaatggcaaaaaagataagtaagaaaggtgatggacagaatgaaaattgaagcagttatttttgattgggcagggacaacagttgattacggatgttttgcaccactagaagtattcatggagatttttcataaacggggtgtagcaattacagcagaagaagctcgtaagccaatggggttattaaaaatagatcatgtaagggcacttactgagatgcctcgtattgcgagtgagtggaatcgtgttttccgacaattaccaacagaagcagacattcaggagatgtatgaagaatttgaagagattctcttcgctattttaccgcgctatgcttcgccgattaatggagtaaaagaagtgattgcttctttacgtgaaagaggaattaaaattggttcaacgactggttatacgagagaaatgatggatattgtagcaaaggaagcagcgttacaaggatataaacctgattttcttgttacgccagatgatgttccagcaggccgtccatatccatggatgtgctataaaaatgcaatggaacttggtgtgtatccgatgaaccatatgataaaagttggggacacagtatcagatatgaaagaaggtagaaatgctggaatgtggacagttggtgtaattcttggcagtagcgagctcggtttaacggaagaggaagtggagaatatggattcggtagaacttcgtgaaaaaatagaagtagttcgcaatcgtttcgttgaaaatggggcgcactttacgatagaaacgatgcaggaactcgaaagcgtaatggaacatatcgagaaacaagaacttattatttcataaaaggggaataggatcatgactgaaaatcactacttattattaacaccaggaccattaacgacaacaaaatcagtaaaagaagttatgctatacgattggtgtacgtgggatgatgaatataatacgatggtgcaagaagtaagagctaaacttgtatcgttagcgacgaaggaagaagagaaatatacaacagtgttaatgcaaggaagcggtacgttttcagttgaagcagtaattggttctgttattccggcaaatgggaagattctcgtttgtacaaatggtgcgtacggtaagcgcattgtgcaaatggcagagatgttacagattgatgtagtggtcagtcaaacagaagagtgggaacctactaatattgtagaagtagagaagttattgcaagaagataaagagattacgcatattgcagttgttcattgcgaaacgacgacaggcattataaatccaattgtagatgtatgtaaattaggaaaacagtatggaaaggttacaattgttgatgcgatgagtagtttcggcgggattgaaatagacattgctgatttacaaattgattttttaattagtagtgcgaataagtgtattcaaggggttcctggattcggatttgtaatcgcaaaacgtgatgaattattgaagtgtaaagggcaaggacgctctttatctcttgatttatatgatcaatgggaaacgatggaaaaacaaaatgggaaatggcgttttacttcacctacacatgttgtacatgctttttatcaagcactacttgaactagaaaaagagggaggagtaagagcgcgttacaatcgatattacaacaatcaaaaactactagtaaatagaatgggagaaatcggatttaagccactagtagatgaggaataccaatctcctattattacatctttcatttatccaaaagagggattcgagtttcaacagttatataacgaattaaagcgttatggatttgttatttaccctgggaaaatttcgaaagtagatacgttccgcattggaaatatcggtgatgtacatgaacaagatattaatcgcttagttgatagtattgctaaaggagctgttattgggtgaaagtattttgcttaggtggagcaggtaaaatttgtcgcgaagctattttggatttagttcaattttcatcttttgagacaattacagtagctgattttaacgaggtagagggccgtaaagtagtagaatggctcaacgaccctcgtgttgattttgtaaaagtagatgtaacggatcacgaggatacggttgcaaaaatgattggttatgacattgtaatggacggtacgacgataaagttaaacagattgtcgacccgctgtattgcagaagcaggatgtcacggtgtgaacttaaatggatttggtgaagaaaatgaatcgcatgctatatttgttgaaaatgaaaagatatgtttacctggatttggcatgacgccgggtgtaacgcaaatgatggcaatgcatgcagcaaatcaattggatactgtagagtctgtccgtgtaagtcacggttcgtatcgtccgattgctttttctgcatcaattacagagacaacgacatatgaatatgatccatatttaccatcgcgtacagtgtatgaagatggtgaatttaagcaagtacctccgtttgcgcgtccgagagaaatagaattgccagagccttatggtaaggcaacgcagtatatcattccgcattctgaaacgattacgctagcaaaggcattagaaaataaaggtgtcaaactgatagagacgagaggaacttggccacagcaaaatatgcaacttgtacgtgctttatatgattacggcatattgcgtaatgatcagattgaaataaacgggaaagaaataggcattatggattgtatttcacagtatttattgcaatcgaaagaagggcaagaaacagagctttatggttatgcacttcatgtagaagtaataggtatgaaaaataatgagaagcaaagacatgtgttatatcatacacatccgttatctgatggttctgttgtaggatgggaaaaattaagagcgtatacgagaaacgtcggtattccatttgggattgctgcagagttaattgcaaatggaaatgtaaatagggtgggtgttgttacgcctgaagaagcctttgaaaatccacaattgatttttgatgagctagcaaagcgcggtattcatattcatgaagaagtttctacttataaagaaaattatagctttgtataagtaaggacgtttataagggagatataaatgaggtgaagctatgtctgtagtaggagaagaaagaaagcgaaccattcttgaaaaggtagaatttaaagggaaagtaaaggtttcagaattagcgagagaatttgctgtatcaacagaaacgattcgtcgatatttagaagaattagatcgtgaaaagaagctgaaaaaagtgtatggtggagctgttcaacttccaggcgctggagtagaggcaccaatgttagaaagagaaatgctacatatagaagagaagaaaagaattggttataaagcagcgacatttgtagaagacggtgatgtcattgcaattgatgatggaagtacaccgcttcaaatggttccataccttgttcatcgtaaaaacttaacgattgtaacaagttcatttccagtcgcaacacaattaatttcttctattaataaaaagatgtttcacggtgaagttttgtttataggtggaaaagtatctccaaagcattcgcgtgtatcagggtctatttctcagcaagtcatacagcaatttcattttcataaagcgttcgtttcgattgatgggttattacctagttttggagtttccagctttgaattagagaaagcgaaattgtcagaggcgatgatgaaattagctgagaaaacatatattttatgtgatcatacgaaggtaggcgtgaaagggaattatcgtatagcagcaatttcgcgtattcaacacgtaatttgtgataaaaaaatgccatatagctttgaagaagaacttaagaagcataatattcagtggacagtttgttaaatacagtgaaagcacataaactcccgcctaatttttaggagggagttttattatctgtaaatcgtaaaataaaagatttgcagttatgcaaaaagtggacacattttctcacctctttcatataatttaccaatacaaaaaaagttggtcgaaggaaagaagggagaacatgtcagaacgaatatataataaacttgtattgtacgcgaatattttgcaaaaaatcggtgtcatcaatgagaaggaaaaaagtgaaattcttcatacgataggtaaaaaagccctttgaataaagggcttttttatttttatatctttaaaaatataaatttaatgtaatattctcattgacaatgataatgatattcattatcatttatttgtggaaaattgataatacttatcaattgtaaagattatatatgataggggatattattttgaaaaaaattacatgaaggcgctagtagtagcgacaacattagcaattccatttgctacgtactctactccagcattagcggcattaaaagttgaagcaaatcaatcggtagcagcagcgagtaatcgcacgtatgatactgagattaaaatatataaggaccaaaaagatgagccatctatggtttctcaatatataaaagatcctaaagtaacgattgcagctggcaaaaaaattgtcactgtaacaatgcaagatagtgattattttcaatatcttagaatagaagatagaaaccagcctggtgtatttcatgatgtgaaggttttgtcagaagataagaggaagaatggaacgaaagtagttcaatttgaaattggtgagtttgagaagaagcacaatatgcaaatgcatatacttattccagctattggatatgatcacaaatatcaagttcaatttgaaattaaagatccaactttaggtaacaaagaaacagagaaaccagatgataactctaattcaggcaatacggaaacggataatccagttgataatcaaaatatgataacagataagaaattaagagagcttgttaataaaaaagtatttaatagaaaagatttaaatacaccaattacgaaagaagatttattacaagtaaaggatttgtttttaaatacgaatgagatacttgattatagtgcattaaaatatatgccaaatttaaaatctttaacagttgcgaatgcgaagataaaagatccgtcgttctttgcgaacttaaagcaattaagtcatttagctttgcgtggtaatgaattttcagatgtaacgccacttgttaagatggataatttagaatctcttgatttaagtaataataaaattacaaacgttgcaccactaactgaaatgaaaaatgtaaaaagtttatttctatcaggcaaccaaatagaagatgtaacagcattagcgaaaatggaacaactagattacttgaatttagcaaataataaaattacgaacgttgctccattaagcgctttgaaaaatgtaacatacttaactttagcaggtaatcaaattgaagatattaaagcgttatattcattacctttaacagacttagtattaacacgtaataaagttaaagatttatccggcattgagcaaatgaagcaattagaagaattgtggatcgggaaaaatgaaataaaagatgttactcctctaagtaagatgacacagttaaaacaattacacttacctaacaatgagttaaaggatattacgccattatcaagtttagtaaacttacaaaagcttgatttagaagcgaattatatttcagacttatcaccagttagtaatttgaaaaaattagtatttctaagttttgttgcaaatgaaatccgtgatgtccgaccagttatagaactaagtaagacggcttatattaatgtccaaaatcaaaaagtatttttagaggaaacagaagtaaataaagaagtaaaagtacctatatatgaaaaagatggtgaggtttctacgaaaatccgtctgaagagcgataacggtacgtatagtaatggtgtagtgaaatggagtacaccaggtgagaaaatatatgaatttggtgtgaaagatccattcgcggatacaggaattttctttacagggtctgttattcaaaatgtagtagaaagtaaagacggtaatacgtctaaagaagatgagaaaacagaagtggtagaatttaaagatgtaccaaagggacattggtcagaagaagcaattaattacttagcgaaagaaaaattatttataggctatggaaatggtgaatttggatttggtgataacattactcgtggacaagtagctcttctaatacaaaggtatttaaaattagaaaataatctagtaccaaaaacggcatttacagatacgaaaggaaatatgtatgaaacggctattgatgcagtggttcaagctggaattatgacaggctatggaaatggtatgttccgtccagatggagtattaactcgatatgaaatgtcagtagtattacaaagagtatttcagttaaaagaaaatgaaaatagtgcagagaattttaaagatataccaaatgaccattgggcgaaaggatatgtgaaagctttagtggataataaaatatcaaaaggcgatggggaagggaattttttaggagataatttcgtaacacgtgaacaatatgcacagtttttatataatgcaataaagaaataaagtgaaactttaatcagtgggggttttgttcattccccactgattattagccctcactaatcgggctgcccgttaatgcggaataaaaaatgaggaaaatacgctattctttaattaaagagtagcgtatttttatgtacaaaatgaaataggaaatagataggagtatagacatatgaatagcctattttaaagaagaaccacgaaactatattgacaaaaaagcgttctcatgtgataattcaattaatttttagaataatcaaaaaatattccttttacatagaaaggattcgaaccttatatgaatattatgccgggggtgacgaaatgttattttttctgaagaaatggaatgaattaaaagatgtgaaatctgaattggcacttcgtgattggttttatggtaccaaaattagcttatcgctatgtacgtcaaaagagccgttaacattcttagtaaatgttgaaggaagagataaagggctattttcggaagaagattttattgtcgtaaattgcatgtgcgagtcagtatttgaaaatgaagaaaaaccagctgcagagtcatttatgcatgcggatatttataaaaaaagtagtgcaggatgtattttacaagtgcagactgtagatagtcatttaatatcagagttatatggggaagaaggagaagtaacgttcgataaacgcagtgtggagcgtgttttcggaaaagaaggtataacagaaatgacaattccaattgtagaagatgaaaaaaaattcgctgatttattagaaaggaatgttccgaatttcattgaaggtggaggagtagttcttgttcataattacggcatgattgtgtggggaaaaacgccagaagaggcgaaaaaatggctagagggtatagaatatttaatgaactatcatgtaaagttattaatgattaagggggcaaggagctctgttatataaaaatggatgtgatatagctacaagttaataaataaatgaaagcgttttaaaaataatttcactcataaaatataggtctccttattatatatagattacatgttgacatgtaaggaggaacatattttgcgagttaaatatcattttctgccaaagcagcaagtaacattttgcaaaataaatgattctggtgaagaggcactgcaaatgatgaacgaaacgggatttcgagccatcccggtattagcagaagatgagaagaaattcacggggattatttataaagtagatttattagaaaaaaaatgcaatagcggattagagcatgtaagtgcaggggatatgctctacgattccaatgcatttatttttgaaaaggattccttcttcagagccttttatgtaattcgtcggcttccgtttttagccgtgctaaatgattataatgaatttgtcggtatgttaacgcattcgaatatatttgatgttattgaagattcatttggtatgcgaacaggtggttatatattaacaattgcaacacaagattgtaagggaacgattaaagagcttgggacattgttaaaagcatataatatcggtggcctatttacgctagataacggtgatcaatatatccgccgcgttattgtaaatatatcagatgagttagatgaaacaaaattaaagcaattaatcggaaaaatagagaaaaaaggattcagagtgagtcacgtagattatatttaagttaaaaagaaaagtacctatctgttatatatagataggtacttttttgtcccactatttgtgggtagtaaaatccacgcctcaaaatttggtgaaagcaaagaagttaggtgggcgggtgttacctgtaaaagcccaattggtgaggctgattatatgtgagtaatgaactttattttgaaacaggaggcggggataatgctagatcagataagaaaataaagtctgcatgctcacgaattttagggatagaagtttcaataacgcgtgatgtaatttcacctggggggcccacatgcccgatagctaccataataggtttttcttgaatttttttgatgagtaattgggcttgttttgaaatatgtcctgctgtatacacatcatcaaaaaatagttggttttcaataataggaactcctaattcttttccgatttttgggacgacactattaggattcgttttactatctaagtaaaataaaccgtgttttttacaagcagcaagtataaggcgaacaattctttcatccgctgttacttttgaccccatatgattgttcattccaattgcatgcggtacttcttgaatggcttgttcaagtcggttgtttatttcttcatcgcttaaatcagttgtaattgctttcggcccaagccattcttttttaccttttataggttccattggcatatgtataataacttcatggcctttcttatgggcagctattgcgtcttcttttgtggaaggaagaaaaggcataacagcaacagtgagtggaatgggaagtgataacatttgattagtccccttcatattattaccgaaatcatcaatgacaatagcaactttattcgtatgagcatttgcttgaataggaaataagaaagacggtaaaaacaaaacaatgatgaataatgcaatcgtatattttcgcatataaatatttcctttctattgttatcctgctatttgtgggtagtaagactcccacctcaacattgggctggataggtgggagattaactgcctacccgattggtgaatgctaattatcagtgggggctgaacaaaaaaacactgattaaagtttcactttatcaatcatcattatgttttgcttttttatataaattaaacaaaaaatgtcgaagaaaagtaggtggaaaattaagaatccccggtttacgtagaatttataaaaaaagaagatgaaaaaaatgtctattattgcgaatgtatttacaaagatagaataatttgtaataattctcaaagtgagggtaaagatttgtaaattacagggagaaaatgttaaattttctgattcttcaaatttgcatatgattaagtagttaaaaaaagtcaatggagaagtgaagttaagagcatggaagtataataagggggatatggatgtttactgtaaaaaggaagtacacattagaaaagctttcacgtgatattcatatgaaacgtgaagaaatgattcaactaggattaacaagtgggctaaatagtagggagacaattcaagttagtcaagaattggacaagcttattttacaatatcaatgttataaagaaaaacaaacaccgaaatggttttcaattataaaaatacctattttccaaatcgggtatgaaggaaaatcaaataatttttggcgaatgcttgtggctggttttatgaaataagtataattacccttataggataaggataattatactatgtgtaacggaatttcgatatgaactgtcgttccttcattttctgtactgtcgataaaaatatgcccattatacatctctacaattcgtttacatatgacaagtccaagacctgttccagtatctttattagtaaagaacggatgaaagaggtgtttttgaatatgttgcggaatcccttttccagtatctgtaatatgcagttgtgcgtgtgtttcattgttttttactacaatggttagtgtatcattagaagtcatggcctcaattgcatttttggtaatgtttaaaaccacttgtttcatatggtctttcgaacaacggatatgaacaggatggtctggcaaatgtaaatggaatacaatgttatgtaaattcgcctcagattgaataattaatgctacctcatttagaattgttcttacatcatatgtttgttcgatgatggcggttggctttcctagaataagaaattcacttacaatttcattgattcgctctatttcttgttcaattacggaaaagtagaactgatcttgttcatctttatatttctcttttaatagagcgacgagtcctttaattccagtaagaggattacggatttcgtgtgctgtactcgctgcaaaagttccaactaattcaattttctgtagttcattttgttgtctttcaagttttgtttgacgttttaacaacatatattgagcaagcaaaaataaaatagacattaaaaataaagtagctatacactctattgcaacccactggtataaggttttttgatgaatgggtaatggagaaacagagaccttccaatttaatctttggagtggggtagtaagcatattagaatgcgtatcacttgtgtcgttattatcatcggttagaaaaactacatcatgtttatcagttacctcaaaatggtattgtggtttaatggcatttaaagaagaggaaatgtaatcaaagcgtaaactagctaataataatcctgagagctccttctgtttattaaatatgggggcagcaatcataatagctttatgtccaagaacgcgatcagtaatgactgatgatacagtggtttttttagtttggagcgcgtcttgaatatatttacggtctgaaacatctataggctttgattcatcttcagatgcgattgtaatgactccttctggtgtagcgtaatatagaccagaaaagcgtgcatcgtttccatctgtatcatgtacaatttgtttaatgccatttatattaccagtctcggtgcctacaacttttgcaagcatgtctaaagcagaaattgcttcaccaagatgatgatccaaataatctctatataaaaagagaactgtatgagcagataatttgttttcctgtttcattttatatgtatgatacgaataaaatgtagcaccaatccctattgtcggtaggataacaagcaatatatatataattatgctttggaatttgactttcaaatgtggtactccttctttttttattatcattatatataaactatgttaaaattgtcatgtttttattcaagaatgatttttaatatattaggggagaggaaatggatgagtgaatgctcattcggaattcacatgaagtatgaagtggtattttctttttattgctgagaatttaagtgaagggttgaaagttgtatgacatcaaataatgaacgagaagatatttctcaatctttaaaagtatttattgcattatctcgtgtacatcgttctgttatggatactacaaataaatctatacaaagtaacgggttaaatccaactgaatttgctgtattagaactgctatatcataaaggcggtcaaccactccagcaaattggtgagcgcattttaatagctagtggcagcattacatatgttgtagataagttggagaaaaagggattagtaaagagaatcccatgtccgaatgacagacgtgttatttacgcgcaattaactgagtctggcgagaactttattgcttctatttttccggggcatgagaaagttatacatcagtcttttgaaatgttaacgaaagatgaaaaagatgaattacttgatttattaaaaaaaattgggaagtatgaaaaataatatgttccaaaggagctttggataaataaatccaaggcttttttatttgtaatgaactcatggcagtcactgccgaaatttgttggaaattaagaggggattcgagaatacgtattgaattataataaaggtatgtaatggagaggaggctcgttcatgtcatttaaagactatgaatataaacgcccaaatattgaagagttaaaagagaaatttactgttgctttagagaagtttgataacgcaaaaactgtagaagaacaaaaacaagtcattcattcaattaatgagattcgcaacgattttggtacaatgggaaacctttgttacattcgccattctgttgatacgacggatactttttataaggaggagcaggatttctttgatgaattctctccagttgtacaaggatatggtacaaaatattataaggcactcattaattctccatttcgtgaagaattagaggcgtattatggaaaacaattatttgctctagcagaatgtgatttaaaaacatattcagatgaagtcgtgaaagatttacaattagaaaataaattatcatcgcaatatacacagttattagcatctgcaaaaattgactttgctggagaagaaagaacgttatcgcaactgattccgtttatgcaaggaaaagaaagaagcgaacgtaaagcagcaagtgaagcatactacggatttttagctggaattgaggaagaactagatcgtatttatgatgagcttgttaaagtgagaacgaaaatcgcaaaatctttaggtttcaaaaactttgttgaacttggatatgcaagaatgtaccgtacagattataatgcggagatggtggctaattaccgtcagcaagtgctagattatatcgttcccgttacaacggaattaagaaagcgacaacaagcacgtatcggtgtagagaagttagcttattacgacgaaaactttgagtttgctacaggtaacccaactccaaaaggagatgcggattggattgttgatcatggaaagacaatgtataaagagttatcgattgaaacagatgaatttttcaatttcatgctagataatgatttattagatttagttgcgaaaaaaggaaaagctggtggcggatattgtacatatattgagaattataaagcgccatttattttctcaaacttcaatggaacatctggtgacattgatgtattaacacatgaagcaggtcatgctttccaagtatatgaaagtcgtaaatttgaaattccagaatataattggccaacatatgaggcatgtgaaatccactctatgagtatggaattctttacatggccatggatgaagctattctttgaagaagatgcagataaatattacttctctcacttaagttcagcacttctgtttttaccttatggtgtatctgttgatgaatatcaacattatgtatatgaaaatcctgaagcatcacctgaagagcgtaagacagcatggcgtaacatagagaagaaatatttaccacatcgtgattatgaggataatgattatttagagcgcggtggtttttggcaacgtcaagggcatatttatagctcaccgttctattatattgattacacgcttgctcaaatttgtgcgctacaattttggaaacgtgcaagagataatagacaagaggcttgggaagattatgtgaatctgtgccaacaaggtggaagtaaatcgttcttagaattagtagaagttgcaaatttaacatcaccatttgctgaaggctgtgtgaaaagtgttattacagaaattgaagcatggttacatgcgattgacgacacaaaattgtaaaaaacatgcgctttttttcacatgtttaacatcgacataatgggaaaatgatgagataataaaagaaaattcagaatactaaagaggtgtttctaataaggagcacctcttttcacaaacaaaaggggggaacaagtatgcttcaatctaatatggatgtaagtttagaaagtttagtaaactcattacagtctactcgaagcacgctattatcagaaattgaaatgttaaatgacacagaagtgaatgtaaagccacgccgtgataaatggagcattattcaaattttacaccacttgcatttagttgaacaatctgtcacgtctgcccttgtatatgctttacaaaaaaaggaaagaaacatgactccatttaaagacctccaacttacgcttgatcgcacacataaacgagaagctcctcagcaaatgcaaccaacagaaactttaatgaaaaaacagcaaggaattcaattgctagaacattcacgccaagaactattacacgcgcttcatagtgttatagatgaaaaagatttatttgaaaatggattaaagcatcctgtttttaatgatctgaatttgtatcaatgggttcaatttcttgatttgcatgaacaaagacatcttacgcagttaaaagaggcgaaacatgcaattttgcaacgctaaagtggaagaagtgggaaaccacttcttttttgatacgtgcatagttttctttcttattttggaatactacatggagaaagaaaagaaggagttgaaaaaacatgtctaagaagaagcgagaagaagagcgcgcctggaaagcacgtaaagaaaatcaacaaccgcacggaaaagtgaaagcttttgctgaattagttgaaggaacagaaaaaacgtgatgagtatttcatcacgttttttgtatgagtggaaaagttaataaaaaggttgtaccgattcctttttcacttataatatcaatttttccattcatagcttgaacaacactgaatacgaccatcattccaagtccagtacctttttctttcgttgaataaaaaggagagccaagacgttttacttgttctgaatccataccgactcctgtatcttttatatataactgaatatgcttatgatcaggaactaatgtgaaataaagatcaccgccttttggcatagcctcaatgcaattttttaaaatatttaataaacattgatttagtttttgcttttcaccagcgataaaaaaagaagtgctttgctttatataatgagtacgtacatttgttaaattagtaagcggtgtaattaacgacaatgcatgtagtaattcttcttctaactgtaatgtttgttctttttcaatgcttggtttagcaaaggttaaataatctgtaagaacatgatttgcttgttcgatgccgttaatggcaatgtcgatatacaattttcgttcctgctcagtacaggtatctgattgtaacagttgtaaaaaacctttcgttgaagttaatggattgcgaatttcatgagagatagacgctgccatttcaccaattaaatgaaacttttcagcatttataagttcgttttggagacgaacttgagtttgtaatatgtgcagtaaatataaaattagaatcgtaccaagcattgaacataactcatacacaataatatgcagtatataatcagtcttatttgtaacctttgaaaggaagaagggtatccaactaaatccgtatgtgagactgtagataatagcaagtgttatttttatacgattagaagtttgattaaaaaatttatatgttaatagtagaacaataaatagaagaacagaaccgataagagatgggaaaacacctaccccacctaataataagcgatatatgtttaatacaactaagatagaaccaccagcaataggccctcccgttaatgtaccgacaattaatacaatatggcgcatatcaaattgaaaaccattatttgtttttgctgcaaatgtaatacagagtacggtagcaaggcaacagagtacaatgaatatagctgaatttaatttaggagagcgtttccctttttgattccaaaataaatgatatacgagcattgtaatcaggatgaataatatatttaaaaagagataaataataaaggatttcagtgggatgcctcctctcttcttagattaaattaatcatactataaaatgaaagaaatgaaataataaatagcggaaaaatcagaaatttttacgctagtatacaatatgttacaataagctgtgtcaatgaaagaagaaattccgtgcatcgcgcgggagaggttcgcgaactccctctataaaaaactatggaaacaacaatatccttaggtattgttttgtttttttattgtgacagttcaagaacgttctttcttcttatttatagtagagaaggagaatgagtgaaatgaaaaaagaaaaagcagttgttgtttttagtggaggacaagatagtacgacatgtttattttgggcaatagagcagtttgcagaggtagaagctgtaacgtttaattacaatcaacgtcataagctagaaattgattgtgcagcggaaattgcaaaagaactaggaataaagcatacggtactagatatgagtctattaaatcaacttgctccaaatgcgttaaccagaacggatatggagattacacatgaagaaggtgaattgccatcgacatttgtagatggacgaaatttactcttcttatcatttgctgctgtattagcaaaacaagttggagcacgtcatattgtaacgggtgtatgtgaaactgatttcagtggttatccagactgccgtgacgtgtttgtgaaatcgttaaatgttactttaaatttatctatggattacccgtttgtcattcacacgccacttatgtggattgataaggctgaaacatggaaattatcagatgaacttggagcatttgagtttgttcgagaaaaaacattaacatgttataacggaatcattggtgatggttgcggtgaatgtccagcatgtcaacttcgtaaagcaggattagatacgtacctacaagaacgcgaaggagcgaataactaatggataacttttttggatttcgcatcgtagagaatttgcaaaaaatggacaaggatattcagcgtaaacaactcaaataccataataaaagagtaatggtcagcaaggaatttacatttgatgcagcacaccatttacactgttatgaagggaaatgtaaaaacttacacggtcacacatataaagttgtatttggaattagtggatatgtaaatgaaataggtcttgcaattgactttggagatataaaagaaatttggaaaaatgaaatcgaaatttatctagatcatcgttatttaaacgaaacgttacctgcaatgaatacgactgctgaaaatatggtcgtttggatttatgaaaagatggcagaagcactaacaaaagagaatcgagtgaacgaatataaaggagctcgcgttgaatttgttcgtctatttgagacgccgactagttatgcggaagtaagacgggagtggatgcttgatgagtaaaatccctgtcttagaaatattcggtccgactattcaaggtgaaggaatggttgtagggcaaaaaacaatgtttattcgtacagctggttgtgattatagctgtgcttggtgtgattctgcttttacgtgggatggatcagctaaagatcaaattagacagatgacaccagaagatatttgggatgagcttgttgcaattggaggagaaaatttttctcatgttacgatttcaggtggaaatccggcattgctgaaaaatattgagtttcttctttctatattaaaagaaaatggaatgcgaacggcaattgaaacgcaagggagtaaatggcaagattggttacttcaaattgatgaggtaacaatttctccaaaaccaccaagttcaacgatgaaaacagattttcataagttagatgctattattgagaaactagcaggaaaagatattagtttaaaagtagtagtattcgatgatcatgattttgaatatgcagttaagatgcacgaacgttatccaaaggtaccatttttcttacaagtaggaaacgatgatacaaaaacagtggatgatgcgatgcttataaaaaatttattagataagtatgaatggctgattgataaagctgtaaattgtaaagagatgaatgatgccaaagtattgcctcagcttcatgcgttagtatggggaaataagcgcggcgtataacgagaagggatgtttaaaatgacaggaagattagatgaagatttaaaagatgtaacattactagggaatcaaaatacaaaatatttatttgaatatagcccagaaatattagaggtatttgataataatcatccaaaccgtgattattttgtaaaattcaattgtcctgaatttacaagtttatgcccgaaaacaggacaaccagattttgcaacaatttatattagctatattccagagcaaaaaatggtagagagtaaatctttaaagttgtatttatttagtttccgcaatcatggtgatttccacgaagattgcatgaacgttattatgaacgatttaattaaattaatggatccgcgttatattgaggtatgggggaaattcacaccacgtggtggcatttcaattgatccatactgcaactacgggcgcccaggtacgaagtatgaacaaatggctgactaccgcatgatgaaccacgatctatatccggaaacaattgataatcgttaatagaaagaaagggcctgtatactatacaggccctttctttctattatattatgcattttgattaatgacagtatagtttttatgacttacaactgtaagaggttccatatctagttctctaaaattcttcataattgttatatcaacaataacagagttttgatttactttttgaacacggccttgcattccacctttaaattcgatgatatctccagtttctgcgatctgcataagcaactctccttgttacagttttcccaaaaaaagaataaatttgggtttttttatttcctcctattttgaaccatatttcctactttgtaaatgtttccaaagtaaaaattcgaaaaatattcactttttgtaagaaaatatgtagaaaatccatgttttttagaaaaaatagcaaaaatgcaagaatctttatatcgaggtataatgaaaaagtagaataacctgctgaagtgggagaaattagaggcggtaaaatgatgtttgaatttgtggggagtgttatagctttaattttatttttattttcttatatgcatttaaaaaagattcgtcaatatgatacgagtacatattttgatgggatggatggtatccatgcttcgataacacatgatagtggtggggagatgtaaaggtatataactttattttcttgcgtggtatgatgtttagaactagtgcataatagagttcataagtgatgaatggagagtgaaaagaatgaagatttcttttattcgtcatggttgtttaagtcgtataagagaaccgatgacaattaattcatttcacgaatggatgaaacagtatgattccgagtcaatgatacaaaaagctaaaatgccgatagaaacaatagaggcaattgaagcagcgaaatttgtcttaacaagtgatcaaaggcgtgctgtacaatcagcagctgaattgacggattctttatcttttatgcaaaattctctttttagagaagctgaagttccttcatgcttttttgctccgaagtggttgaaatgcacaattaaggtatggatgttcattggacgaacattatggatacttggctaccataaagatgttgagtcttataaggaagtaagagagagggtaaggcaagcggcttacctgttacatcgttatgctctcgtacatggaagtatagctcttgtaggtcataattatgtgaatgtaatgattggtgccgaactgagagcgatgggatggtctggttctcctattttgcacagagagccatggggatgtacaacatatacgtttcacgaggcgatggatggaaatatattaaatacaaatttaacataaaagcacacgatttatataaatcgtgtgctttctttttaagatatagaaattttgacgtttaatggttttacgagatgagcataaggttctcctactagcataacaatttcatcttttttataacctaacttttcgtatagtgaataggcgcgtttgttttctaaattaacaagtaaagcgatttttttatgccctttttcagttgcatagatttcggcagcttcaattaatttagaacctataccttttccgccgtgtgcacttgaaactgataatgtatcaatgtaatactcatcaagctcagcttctttttctaacgtaattgattcatctttatgtaatgctcttaagtgatgtacaattggtgcgtcaagctgtgttgcttcactaccgtgataagcgacaataattccaactgcactctcgtcttgttcatagacaaaacagttttcgtagctcagacggttattttcttttgagaaccatgtctcaagtcctagtaatacttctgcttcaactgtgctacctgtgattttttcagcaatttcatgcagagcattatacaataaaggagctattgccattgcatctgtcttttttgctttccgaatcatagtatccctcctagttctatttgtatattgtagcatagtggtatggaactttgcataattgaatgccgaaatgtttgatatagagaagtagctatgttagtatatgatatttagtggacatatagtaaaacaatattgtttgcgaaataacgaaaataaaatcatggcataacaacgagataaagtgaaacgttaatcagtaagattttttgttcattctacgactgattagtagtcaacaccaatcggactacctgcaaatagcgggataaatttacagttgttgacctatagaatataagataaaataaaatattgcagagaggtgaaatacatggataaagaattagcaaatacaattttagatcagctaaaaaatggtgaaataaaggagtatgttgttacgaaagatgtattttatacgttcagagaagttgttgtaaatagagaagactttaagcatttcattggtaacgcacagcgaggcgggcaagtgatttatacatattcagaaacgccacgttcataaaggagaattttgatcagcagggcatctctcactgattagtagccttcaccaaacggacgtttcatgcgggataaataaaagataaaggagaggggaattatgggcgattttaaacaaggcattttaccacattgggattatatgtggaaagatagagccggcaatcgatttatgggaatggttatgtatccagagaaacgaaaatgttcagcaaaaatgcttcagaaaataaaaagagcatatgaagaagcaatagaaattaaagtaactgtacaagttcaacatacatatcagtacgtagaaggactgattgtatactttgatgaagaggctcctgtatgtacaatgcttgataaagatgaaaatccacatcatatatttgtaaaagatattttgcgcattgagtactctgaataaacttttcataaataaattgaagttccataataataatctttttctataatagttatcttttagtatgtaacgaaaaacgaaagtatatgtataatatatttaataaggtaaatttgataaatgtaatcgttttttagagcagattatagtttcatatctgttcttttttgcgtgatgctggagaaatatatttcttcagcatctaccgttttatgacaaaatatattgttaacttttttaaaaataaggttaaattcgttgacaacttttttgaaaagcactttattgacatgagttttagaatgttgtttcatagtcattgtattgaaaaaaaacggctatcatgtcgaaaagtaaaagttaaaaaaagaaagaatttatacatatatcttgtgtcttattttgaaacgtaatacaatatatagagaaatcaagaacaacatatagagaatatagatttgagagggagggtcggaaatgttagttgcatatgattctatgacaggaaacgtgaagcgtttcattcacaaattaaatatgccggccgttcaaattgatgaagatctagtaatagatgaagactttattcttattacgtatacaacaggttttggaaatgtaccagaacgtgttttagactttttagagcgcaataatgaaaaattaaaaggcgtatctgcaagcggcaatcgtaactggggagacatgttcggtgcaagtgctgacaagatttctactaaatatgaagtgcctattgtatcaaaatttgagttatctggaacaaataacgatgtagaatattttaaggaaagggtgcgggagattgcgacacattgaactgaataatgaaatcacgcaaatgcaggacggtttttatcagcttcataaagataaagaggcattagaagtctttatggaagaagctagagagaataccgttccttttaatagcgtggcagagcgaatggagtatatgaaagaacatgattactattacaacgttctggacgagtatagcttggaggaagtagaggaagtatataacatcgcttatggtgaaaacttcgagttccaatcttatatggcagcatctaagttctacaaagattatgcgttaaaaacgaatgatcaaaaacaatacttagaaagctatgaagatcgtgtagcaattgtttcattatacttaggacgcggtgatgtttcgaaagcaagacaattcgcaagcatgattgtaaaacaaaactaccaaccagcgacaccaacctttttaaatgcgggaagaagcagaagaggagaaatggtgtcttgtttcttgttagagatggatgatagcttaaattcaattggctttaacattaatactgcgatgcaattatcaaaaatcggcgggggagtagctttaaacttatctaagctacgcgcacgtggtgagcaaattaaaggtatcgacaacgctgcaagtggcgtagtacctgttatgaaattgcttgaagattcgttttcatatgcgaatcagcttggccaacgaaaaggtgccggtgcagtatatttaaacattttccattgggatattattgaattccttgataccaaaaaaataaatgccgatgagaagagccgtattcagtctctatcaatcggaattatcgttccaagtaagttctttgagcttgctgagaaaaacgaacctttccatgttttcgcgccttatacggtttataaagaatatggcaagcatttagatgatattgacattgatgaaatgtacgatgaattaatgagcaatccgaaagtgaagaagaagccactagatattagtgcacgtgatatgcttattaaaatcgctatgattcagcttgagtctggttacccatacttaatgtttaaatcaaatgcaaataatcaacatccattgaaggatattggaactgtgaagatgtcgaacttatgtacagaaatcttccagcttcaagaaacttcagaaataaatgattacggtacagatgacattatccgtcgtgatattaactgtaacttaggatcgttaaatattgtaaacgtaatggaaaataaagaaattcgtgaagcagttcatgcgggaatggaagctttaacagctgtttctgatatgacgattattccgaatgcaccaactgtgaaaaaagcaaatgacgagcttcattcagttggacttggagcaatgaacttacacggatatttagcaaaaaataaaatcgcttatgaaagtgcagaagcgaaagaattcgctcgtacattctttatgatgttaaattactattctattgagaaaagtatggaaatcgctacagaaaaaggcgagacatttaaagacttcgataaatctgattatgcgaatggcacatacttcgaaaagtatgaaacgacagattacagtcctgtaactgaaaaagttcagcaactatttgaaggaattcatattccgacaaaagaagattggacaagtttaaaagagcaagtgcagaagaatggtttatacaactcatatcgtcttgccattgctccaacacaatcaatcagttacgttcaaaatgcaacttcaagcgtaatgccgatcgtaagtcaaatcgaatcaagaacatatgcgaatgcgacaacatattatccaatgccgtatttatcaaaagatacgttctggtactataaatcttcttacgatatgaatcagtttaaattaattgatttaatcgcagaaattcaagaacatattgaccaaggaattagtacaattctttacgttaatagtgatatttcaacacgtgaattagcacgttactacatctatgcacataaaaaaggcttaaagagtctgtattatacgagaacacgtaaattaagcgtggaagagtgtgtggcttgtaccgtttaatggcatattgccatactaaatgaataacccaatagtatgagcagggttatgaaccctgctcatacttggtttgttctactaaacggttagcttttcattgttagatggaaatttaaccgttcagtagaacaataatagatataggggtgattcaatgcgcgctgttaactggaataaaaaggaagatgatttcagtttaatgttttggaagcaaaacatcgctcagttttggacagaagaagaaatcgcggtttcgtctgacaaaaatacttgggtgcaattatcgaaagaagagcaaattgcttataagcgtgtattaggtggtttaacacttttagatacgaaacaaggtggcgaaggaatgccacttgtacttgttcatcttgaaaatttacaagcgaaaagtgtattagctttcatgggagctatggaagaagtacatgcgaaaagttatagtcacattttcacaacattagctacagaagaagaaattgatgatatttttgactgggtagacaatcatccgttacttgagaaaaaagctggtattattactagttactatcgtcgtttattaaagcctgaagtaacgaaaaaagagttatacatggcaatggtagcaagtgtgttcttagaaagttacttattctatagtggatttttctatccactttacttagctggtcaaggtaaactgacggcaagtggtgaaattattaaccttattatccgttaacttatggcggcttttggtagagataccaattgaaaaacccttttaattgctgggaccccctagtgtaaatttatctgtattattattgatgaatatatgcattcaggttattctctaactatcaatagatggaaaggagaatagctgatagggcaatcagcagcgaagcctttatctagcgataacatgtacggaagtatcagacatcgaaaactgtataaacagtggtgggtgcgatacgtagataaaggaacgttcaacgactatcccaatggcggtgaaattccgcaagaggagtagggccaagcggtgggtgagaatcccttaaatcgaaatggagggctacctgagaaggtagatgatatagtctcttcttacaggaaactgtaagctgtataaacggcataggagtagcgaacttatgtgaaggtaaaggatgagtcaattcacggcgtattcgtcggtattttagcacaacaaatcttcgcagaactttctgtagaagagcaacaagaagtgcaaaaagaaacacaagagttattaatggaactatatgaaattgaaatggcctatacagaagaaatttacacttctatcggtcttgtagaagatgtaaatcgtttcgttcgttacaatgcaaataaagggcttatgaacttaggacttgagccgaagtttgaagaagaagaaattaacccaatcgttttaaatggtttacgtacagatacgaaaaaccatgatttcttctctgtaaaaggaaatggttacgtaaaagcaacgaacgttgaaaagttagctgacgatgacttcgtgtttaacttttaatataggattataaggaaaagctgtcttattgattgataagacagcttttctttataattttgtttacataacactattatttttgtatagcgatttatatttgggaagttctattcggttaacggatagaacttttttgtaattaaatgggtatttacaaaccttttgtatcagtgtattatttaactagtacaccgatacaaaaggagggaagaaatgaaaatagagttttctccaaatacaccaatttacattcaggtaatggaatgcataaaaaaagagatcgtaacaggacatttattgcctggtgataaaattccctctgtccgtgaattagcgagtgaattacaagtgaatccaaatacgattcagcgtacatttcaagagctagaacgggatggagttgttgtcacacgtagaggaatgggacggtatgtaacgaatgaaggggagaaaattatggagctgcgaaaagagatggcgaaagaattacttcattcttttatagatggaatggacaatttaggtttttcagaagaagaaattcttacaattcttcgttcttcattacatgataagagggaggagagccaatgacagagctattgaaaatagaaaacttatggaagagatacggattaaaagcagtgatccgtgaattaaacatagagattacggaagggaaaatcgttgggcttgttggagataacgggagcgggaaaacgacgttattgaaaatgattgcaggcttgcaacacccttctgaaggtagtattacaatagacggtaaaaaggtaggattacagacgaaagaaatcgtttcatttatgtccgataagccagtctttgatgattggatgactgtaaaagatgctttatttttttaccgagatttttataaagacttcgatattcaaaaagcggtagatacgattgcagaatttaaaataccgttagaagaaaaaattacagcattgtcaaaaggtatgatagagaagctgcaaatcattttaacattttctcgaaaagcgaagctatacgtactggatgagccgttgggcgggatagatcctctttctagagaacatgtattggatttaattctacagttctatagggaagattgtacgatattaatttccactcacttaataaatgaaattgaaaatatttttgatgaagtgatctttttaaaagatggagaaatggttctatatgaaaatgtagaagaaattcgttttcagagaggaaaagcagttcatgaattgtttaaggaggtgtttagtaagtgaagtcagtactttcctatttatggaatgtaaataagaaaagatatattgttacttttttattctttgtgctaattgaagctgtgttattttcacaaatgattgtaagaaaaagtgatgcggctatcagtagacaagagggtatatttggaatcattatgattatatttttcttttatattgtttatatgtttatacaaacaatgaaatcatattcacgcttactaactaatccaatgttacgacttacagcaatatctgggaaacaatatgtaatttctatgcttattttctcatttatcgcaatggctatatggtatgggatatgtggaattcttttctacgtaagttatgtattagcttttcctacgacttctgtatatgtagaggcaaaagagattatgcaagtaggcataattaataatttaatatatacgataagcgatttatttgagtttttgtttagtgtgttacaaatcatattagtaattactctagttaagttacttaccaaaaagaaaaaggcgcaaaatatactgatcgttattatttttctagtaataaatatagcgattactttagcgacaaccttgctaggaaaattagctccagctttccaagtattgcgaagagtagaatatcatagtgaaagcaagagtctgtttattaatatgtttcaagaaaatggatttaacatttttaatataagtttcatggtaatggttagtgctctaataatatatgtaattgcttatattatcgataaaaaactagaagtctaaaggaggaatcagcattgggaaacgtagtagtaaagttagagaatgttcgaaaaaggattggtggaacggaaattattcgtggtttatcatttgaggttcgtgaaggagaagtatacggattccttgggccgaacggtagcggtaagacgacgacgatccgtatgatgacaggtcttatttcaatgacagagggcgatattacaatttgtggacatagtattcgctcggagcgtgaaaaggcactagagcaaattggagcgattgtagaaaatcctgaactatatgattatatgacaggaatgcaaaacttaaagcattttgcgaatatggccattacaccaattagtaaagagcgcattgctgagattgtaaagcttgttgaattagagcatgcgattcataaaaaggtgaaaacatattcacttggtatgaaacaacgtttaggaattgcacaggcattacttcatcagccgaaaatcttaattttagatgagccgacaaatggattagatccagctggtattcgccaaattcgtgattatttacaacgtttagcgaaagaagagaatattgctgtaatcgtatcaagtcacttattgagtgaaattgaattaatgtgtgatcgcgttgttattattaaacaaggtgagtttgtacaagagtacaacttacatgaaaaagtgaaacatgatgaggcagtcgttgtagcgtttgaagtagatgaagttcagaaagcaaatgaaatcattaaaggcaaagcaaaagggaatgtaattgtagcatctgtaacaaaagacaacattccgcaacttgtaaaaaaacttgttcatgctgatgtgcttgtatatggcgttactgttcaaaataaaactttagaggatgagttcttagcgattactgggggagtgaaagcgtaatgtttaaattaattcaaaatgaatttttaaagttgcatgcgaaaaaaggtatgtatattttaattggtgtcattgcggcactcgaaattttaggtactttagcaatgttgaagtggggaaaaggtgatgagtttaagggggcatatttagattatgcaaactcagagattggcttaattgttttatttacaacgatttttgggattacacttgctgcccgtactcttactgatgagttccaaaaaggtacaattaaacaattgttaatccgtccaagaaaaagacttgcagttttattttctaaatatattacagtgttattagcaatgttatttatcgtattagctggtatgctaattgcaatgattattggcggtattgtaatggatggtagtaaaacagaattaacgttaggaatcgtaatgaagtcaactttatatcaactactttcaccgttcttttttgcaacacttgcatttttcctagcaaatgtctttagaaaatctgtattaccattaattattacgatgttcctattcttcttacaaggtgcaattaatatggtattaataatgtttgcaaaaggtgtagcgaagtttgtagtattcaaccatttggatttaagagcttacgatagtaataaattaatcaatggtggaatggaaccaacatttacagaatttacgtttacaacttcattattacttgtagttgcatactttgttgtgttacttgtagcatcaagtgcattattccaaaaacgtgacgtattataataaaagaaatccccgcttgtaaaaacggggatttttattacataaaattcacttagattgcaacaagtatgcaatttttcggtggagaagaaagtggtacaatctcaattactgaattacaagcgcaaagtaatttatggattggtattggtcttacagttgttggattactttggttaattccttatgtttggaaacaatggcgtacagtaaaagaagttggcgtgccacgagtacgttttataaatgagcaaaaagtagtgagttcatcacaagaaaatgaagtgtatagtcaagtgatcgtaaccgatagattgatggccatagagttaccagatgaggctgtaaataagcttcggttagaagaaaatgattatgtaacagtatctgtagaagaagataaaatcgttataaagaaagcacataatagataattaaaaagtagctccttaggagctactttttaatttgtaataatttctacacgaaaattattaccgttctttacatatttaatatctgtaacagtgcggaccgtctttaaaatctccactttttcaccaattcgtgggatggtcggaacattgtcccaaataccaagcaagtcatctaattgtgccgttttttcataaaaccagattttcaatgtaaagcccctttctcgaactttatgtattttaatacataatatattatttttattcttattgtaaggggtttttttatattttatgaataaaaataaattaatcttctgggaagatatgttcaatatcaggagtaagagatacttctgataatacgatatgagaaacggtcgttgcatatgaagaaacatcattgataaattcttccagttcaacgagtgaaggaacagaaatttttacaatgtagcataagcttcctgttactcggtaacaaaaacttgcagatggataagattgaataaactgttgcatacgtgttgtatcaccattttttaaagtgatttctaaaatacaatctaaaacgagtcctgcttttttataatcaatatcgattgtgtatttttgaataacaccttcgctttcgagcttacgaacacgttctgaagtagatggagcagataagtttactcgtttcgccaattcacgcatcgaaaggcgactatcattatataattcatttaaaatttttcgatcaacacggtctaattgcatttgtaaatatacctccagtaaaataatgatttttgtaaagggaaaatataaattaagattcatatgaaatgtaaagtgaacgttatttattttacaataaaacagaaggaaataggaggggaaatgatggagagaatttcattatcaaatgtaggagatacaaagtttcaaaagttattagggcataattcggatatattacattcgtggagtacgttagaagatacactgtacaataaaggaactctttcagcagagttgaaggagcaagtgagaagaacattagcgtatgggaatgaatgtccgtactgtatggcaaaaggaagacctgatgatatgcaaaaggcagaggagattggtgtagccgttacttttgcgcatacatttgttcatgaccgaaaagcaatagatgatactatgtttcacgtattaaaacaatattggacagaaaaagaaattgtagagctttgcgcctatgtttgctttattactgcgtcacaacaacttggttttctatttcaattacagccaaattaagggggaaatgatgacaaatcaaatagcacttatcataatcgatgtacaaaaggcatttcaattaccagattggggcgagagaaataatatttttgctgaagaaaacatgagaattttgttagaagaatggagaaaaaggaaacgaccagtttttcatattcagcatgtaaataaagaaaatgctcagtcaatgttttatgagagagcggaaacggtaaactttaaagaagaagtgcaaccactacttggtgaagtggttattcagaaattcgttaacagcgcgttcattgggacaaatttagaagagcaattaagaaagaacaaatgtaatgcagtagtggttgtaggattaacgacaaatcattgcgtggaaactacaacacgaatggcagggaatttaggatttacaacatatttagtgagtgatgcaacggctacttttaaccgtaaaggtttagatggtaaggagtatagtgcagaagatattcacaatatgacacttgtaaatttacatgaagagtttgctacgattgtgacgacaaaagaagtattaaaattattttaagaaaataattgcaaattatgtagaaaaaaataagaatatttcgtataatctaagtacaatcattttgaaaataggggtggcatcatatggagcaaatttcagtaaagaaattagaagaggtacttgttgtagcaggggatgataaacagaagcaaaaggaattttatgaattgctcttatttactgagttttatgttgctggttcactagaagcagaggacggggcaacagagggaatacttcgtttgcgtcatttccaaggagaaggtagatggatcgttccgttctttacacaaatggaatttgtaaaagatgtgttgccagaaggaacgccccttattacgatacgtgggaaagagttatttggtagcattgagaaagatgctacagctgtattaaatgttggtactgatataagtaaaacatttattccagaagaaattgcagatatctcatctggacgaatttttaattattataagtaaaaggaaaagcgtaatcgcttttcctttttaatttgaatatggagtggctataccggaagaaatagagactgttttattattcgtgtttattgtcgctgtagctccaagtggaataccgatgtttggacttatatgtccaattggtaaaccgaataggaccggtatatgatatggtgcgaaatattcatataatattgcttgcaatgattgagatggctttgaaggagtgcagtcgtgacaacttgtgaaaataacgcccctacattcattaaactttccagataaaagtagctgatttaacatacggtcaatgcggtacggttcttcaccaatgtcttcaagtaataaaagtgtattgtccgtatttatctcgtagggcgagccaattatacttgttaacacagctaaatttcctccaactaacgtacctgtaactgtactgtgagagctagatacgatacattctgatgcagataaaatggttgaatacggatggaatagctgattgaaagaggataaagatagggaatcaataccttttcctagttcttcaatcatcggaccatgaaatgttataagctttgcataacgtgaaacagcagtatgtaaagctgtaatatcgctatatccccaaaagattttagggttttgccgaatgatttcatattgaatgtgagggaggagacgagcacttccgtaaccacctcgtgcacagaaaacggccttcacttcattatttgtaaatgcttcatgtatatcgtcaagccgaacttgatcacttccggctaaaaatccatatttctcgtaaacgctcttcccgattattacggataaccccatctcttgtaatacattcacaccttgtaatacattttcgattgtaggtggaccagatggtgcaatgatcattactgtatcaccttgttttaatgcatttggataaatcattaagctcagcctccttctctttcaatatattcgcttcatatgaagttcaacccttgcaaaagcaggggaaagcttatcaaataaagaagatataaaggaaataggaggggaaatgatgtttacaagtcgagtaacagacatattaaaaattgagtatcccgttgttcaagccggtatggcaggcgcgattacgacgccagaacttgttgcagcagtaagtaatagcggaggattagggacgcttggagcgggctatatgagcccagaacaaattcgtgaagcgatttatagaataagagaactaacagataagcctttcagtgttaatttacttgtaacgaaagagatacaaatagaagaagagaaggtaaatgaggcgaaagtattactaagtggagtaaatagagaattaggtatagaagtagaagggacgttaaaacttccaaaaagctataaggaacaattacaagtgttattagatgaaaaagtaccggtcgttagttttgcatttcaaacgttagaaaaagaagaaataaatgatttaaaaagaagtggaataaaagttatcggaacagctacccatgtgaaggaagcgaaagtacttgccgagttaggagtagatattattgtcgggcaaggaagcgaagccggagggcatagaggaacgtttattgggaaagaacgagatgctatgatcggtacttttgcgttaatacctcagttagtaggggctattccgcatatcccaattgtcgcagcaggtggtgtaatgaacggacaagggcttgttgcggcattggcactaggagcagaaggtgttcaaatgggatcggcctttttaacaagtgaagagagtattacgcacgatgtgtataaagaagcggttttacatagtacagatacgagcacaactgtaactcgtgcgttttctgggaaatatgcgcggggtattcggaatgaatttatagagagacatgaaggaaaagaagaagggctgccgatgtatccagtgcaaaacgtattaacttctaaaatacgccaagaggcagcgaagcaaaataaggaagaatatatgtcactttgggcaggacaggcagcatcattagctagaatcgaatcagctcagcatgtagtggagcgagttatgaaagaagcagagaatgcaatcgaacaattacaaaatatatacaaaaagaccacttgagtaattcaagcggtcttttcattagtttgctttataaaattgttggatggcttcgtcgatgtaaacccagcctttccaacctaagtgcatatgatcttttaagaagtatttatcgtattcatgatttgagaagtcggcaattggataaccagctttttcaatttgctcatgaactttcttatagtatgcttcgcggcgttctttcgggaagccagcgtagtcgtaccaaggacctttgacaggaacagaaatgaagagtggttttgcaccagattgttttaataaatcaagtacaatttgtaaatcttcatattctggcgattgatcataagcatcattttttaagtagccttcacgttgctttaatttcttcttgattttgctattgaagtaaccatcttcgataccatattcattagatccagattctgctgcacctgtttgatctgcatgtttacgagcttcatcccagttcatttgttttaatgaagggtcaagcttttctttatgcggtttaatattaaacatagctgtaaataaatctttacgatctaaaatgttacggtaaatataagcgaaaggtttagcagcaagtgcttttactttatacttcgtatcatcataagcgatgccttcaagcgagatttttaataaagtttctttttttacaatctcaaagtttaataaacgctttgcaatttgttttttcatttcaggttttaaatcattgttgaaaatgaagtggtaaccttgttgttttgaaaagttaggtgcaaagtgcgtttcatcaataccttgtggtacaaaccattgcggagaaagaacgaataccattttcttatctttcaattgatccattgtagatgcgaagtttaacacatgtacaaggtcttgtgttccgccgcgtccaagaaggaatggcgtaaatccttcaggctttactttaaaataattagatggatggaaagcatccatacgtgcgaattccgatgaaccgtacatcggaagatattttggatctgctaacatcttttgctgtaaaatcatactttgaattttttcttcttttaaagaagtagcagcttgttctactttttcatcacttaaaagtggaagtaggaagcgcgttggaataagtaagaatacagcaaaaagggccaatgctaaaagcatcggaccaaattttgctttgttcatcggatttcttccaactttttaataaccatgtttggtgtagcccactcgtcacggtcaaaatcagaaatagaaacttcaatatctaaacgctcttggaattcaactaataaagatactacagcaaaagaatcaagaataccttcttcaaataattgaacatctaagttttctttcacaatatcgttttcacatacttcttctaaaatatctaatacttgctctttgaattctgccatttttaaaatctcctttatatccgaaatatattatatgtgcaacttcttaatggaataagaagggtgcattaaaagtatctgttaaggtgtccagagaagattaggaaaccgaaacatacaatgtggaacgtaattacaatcgcaaggatgcgtgtgaatttattgtttggccaaaatttatgcttcttgttttttcgttcgaaaatatcgaataaaataaacagtgcggcatgatatagaccataaataatatactgcgcaacagcgcttccttggatatgccaaattcccataatgaagaagtttaaaaatgcaccgatatacgaaattgtgtaacggttcttaattaactttttcttcgttgcaaaaaatacgaaacgcatgtagatgaagtcacggaaccagaatgataaactcatgtgccagcggttccagaagtctttaatattacgactaaggaatggcttattaaagttttctggcgttttaattcccatcatataacttacaccaattacaaaagagctataaccagcaaaatcaaagaatagatataagctatagctatacatgtaaatcatatttgaaaagattgtatcgtgttgagcgaatgctggatccatacaatattgctttattaagtaagcaataataaatttatacaagaaaccttggaaaatacgatttagtcctgtatatagtaaattttgatattcttcagcgctaggtggcttttgaatatctttttggaatctacggtaacgatcgataggtcctgttgaaatcgcagggaaaaataaaacgaattcccagaagttaaagaaagaaagctctttaattaaaccatcacgaacttcaaataccatttgaactgctctgaatgttacgtaagatatacctagaaaaacaacaagttttaactcaggtagtaacgatgcaaatggtgcgatttttgccaaaataagaggcaaaatcgataaaataacagctatgcaaaatgtgaatgtactattatttttttttcttaaaattaaatagcctttaattagggcatattgccaaataataaatgcggctaacatcattgcttgctttggtttatctgagaagataatagcaagcatgattaatgttaaaacggcattatatttacgcaacattttaccttttaatccagctatgatagtaggtattaataaaatgcccactatagcgaaaaaataaaatgatccatatgcggtcatgctgtaacctcactcaataattttttgcgatctacctttccatttggtgtcattggaatagaagattgatacatgaatttacgtggaatcatgtagtttggtaatcgctcattgagttcttttttgattgcagatgttaatttgaattctttttcaaacgaatgctccccaggaacaacaaccgctaataaataatcgtatttctcaccttttttaattggaacgataactgctccttctacgtaagaacacgcacgaaggtgatgctcaatttcttctaattccattcgataaccatgcaacttaatttggaaatcaagacgaccattatagaatagaagaccattttcaacatagccagcatcgcctgttttataggcgcgctcaccgtcaatcatagtaaatgctttttctgttaattcagggcttcctaaatatccaacgcttacgcttggaccgacaattacgatttcacctttttcaccatcaggtgcaatcgtgccatcttctttcataataagaaggcgacagtctgatttacaatagccaactggaagtgatttgtattgattaagcacttcttctgtaacgtgaatacctgttacagcgacagtagcttctgttggaccgtaagtattcataattgttgcttttgggaaacgctcaattaattttctagccacttcatttggtaacacttcaccgcagaataagaatgttttcatgttcggtagcatactttcagagaaggatgcttccattaaacacatttcagcgaaagaaggtgtcgaagtccatacttgaatatccgattgctctaaagaagcaaacaagtcttttggacgcgcaatcatatctttatcgattgcccaaagtgtaccacctgttactaatgatgggtaaatatccattacagataaatcgaatgagaaaggtgcttgatttaagaatacttgccctgtttgtaagttgaaatcttctacagcccattttgtaaagctaacaaggcagttataagtaatctgaacccctttcggattacctgtgcttcctgatgtgtaaataatgtagaagttctcatcaccttttaccgcatgttcaggatttggagtgttccctttatgagtaaagaaaatatcttttaagttgtcttcacttacgatgcgaactggtaaatcagttacagttactgctgttgccgataaaagtaatttcgcaccagaattttcagcaatacgttgtacacgatcagctgggatagataaatctacaggaatgtaagcatgtccagcttttacacatcctaaaaagttaacaatcatttcaggttgcatatggccatacaccataattggtgaacgatcgtctggatactcagaagaaatccaatgtgctaacgcatcagaatcttcctttaattgtttgtacgtaattttcgcatctcgccaaacaaaagcggtttgatcaggcgtttctgcagcccacttttcaatttgttctaataacttcataacgttcccaccctagaattcattgtaaataaatgtacttgtgtttgtatcatggaatccatacaaccaaagtaatgcaaataaaattgcaagataataaaccgtctttgcaacccattgtgtgagtggtcgagaccatatctcttttaatctttccatgtctttccctctcttaatgaaataatagctctttgtaggtatcatgtcctacattattgtgaaaaaaacaaaatcccacattttaggtaaaaataagtcaaaaggctcttttttgatattagcactaaatactaaaaaagaaaatccctaacttagcaattatattacattcagcatgaatttgtaatgggtttgacatgtaaatagaaagtggattgtgtgaatacataaaagtggactataagaatacgtaaaaatacagtatttgtttttattaatcattcaagacggagtaaacttttaaatttctagttcttttgaaaaggaggaaattatcatgaatagagtgtggaagaatctaatttcggaagaaaatatcgtgaaatggagaaggcacttccataagtatccggaattatcatttcatgaaaaagaaacttcgcaatttatatatgatacattatgctcattttcttcttttgaagtaacgagaccgacgaagtatagtgtactagcaattaaaagaggtgtgaagcaagggaaagtaattgcgattcgagctgatatagatgctttgccaattcaagaggagacaagtaaatcttatacatctgtgaataaaggaatgatgcatgcatgtgggcacgatgctcacacagctattttattaagcacagcagaggtgctatcaaatataaaggaagattttgcaggtgagattcgtctattctttcagcacgcagaagaggtgtatcccggtgggggacaagaaatggttgaggcaggtgtaatggacggtgttgattatgtaataggtttacatgttatgtctggattagaaagcggaaagataggaattgtgtatgggccgatgatggcggcaccagacgtatttacagttgaaattcaaggcaaaggaggacatgcggcgcgaccagaagaaacgatagaccctattgctatcggagcacagattattacaaatttacaacatatcgtatcaagaaatacgagtgcttttatgcaaagggttatttcagttacacaatttcatgggggaacggctgacaatattattcctagtacagcaactttaatgggaaccgttcgttcatttaatcaagcattgagggtggaagcagaagggaaaatcgagaaaattgtgaaaggaattacagaagcacatggaggatcgtatacatatacgtatcgatatggatatgatccggttattaatgatgaatatattacgaaaatagtagaagaaagtgcactacatttgtttgggaatgagcgtgttgtgaagcttgaaccttctatgggtggggaagatttttcagcatatttaagaaaagcacccggttgtttcattaaattaggaacaggtaatgaaaatatatatacttgttatccacatcatcatccgaaatttgacgtggatgaatcagcattaatttgtggagtggagctatttttagagacgactataagattactaaaatcatagaaaaacaaaaaaaggcaactgcactctattgcagttgcttttatttctttccgtcagagagggctgagaaagaactatgctcattcatagtatatgaatagctaacggacaagcttgtacattttaatcatttttttaaaaatagttgttgacactgataatcaatgtcaattaatctaaaagtagttgaaattgataattattatcaataggatggatgcgacatgttaatgagaaaaaattttcaccttctgcggaggggattaaaagataaaaataaaaataaagatgttgatcagcatatggaatggcaaagaaatgtaattcggtctgaatatgtagatgagaagaagagcattcaaacagaaaaagagatacaaagtaaagggagaggttcagttgagtaagttagtaatgatttttgcaagtatgagtggaaatacagaggaaatggctgaccacattgccggcgtaattcgtgaaacagaaaatgaaattgaagttattgatattatggattcaccagaagcttctatattagaacagtatgatggaattattttaggtgcatatacttggggagatggtgatcttcctgatgatttcttagatttttatgatgcaatggattctattgatttaactgggaaaaaagcggcagtattcggatcgtgtgattcagcttatccgaaatacggagtggcagttgacattttaatagaaaagctacaagagcgcggggcagcagttgtgttagaaggactaaaagtagaattaacgccagaagatgaagatgtagaaaaatgtttacagtttggagctgaatttgtaaaacacctttcttaatggcagaagggagatgaagagcaagtgcatgagaaaatctcaatcaaaacgatgacagattatcatttgtatgattttatgcgttgtccgcataaattttattttcgtcatataaaaagaagagaaccttcttcatttgaatggcaacaaatagcacaaatgattgtcaatcaaattattaacgagtattacacgctacctgcgggtcaacaaacgaaaattgtacttttaatattaatagaaaagtattggaaaaaagtaaggattaatatgtttgcttcgaagacggagtactatattgtattagctaagctaacggatcacttattacagtttgttgaaaaggatgatagtcagacaccaccattgtttttatacgagaagtttcaaacatatatggaagagttaggtgtccacatgtcattgacatttgaagttggtgagtggagtgctgggtcgtttgtaattaaaaagtatgtcgtcgatgcggatgaggaaatgcttgctctttgtcagaagctaatgacagtatttagttataaagctttcggcgttcttccaggaaagattgaagttattaatttaatagaaggaactaagtatgagtacattccaaaacaggaagatattataactggaatggctgatttatctagaatgaaagaaatgttgcaacaacctgagcattatacagagcgtcattttcgttctgagtgtataagttgtgcatttcgtagtgaatgccaaggggaagaagtaaagaaagaagcggagcagaagaaaaatatcgtacattaaaggatgcaactttgcatccttttttgttgttgacatgaaaagcttttcatcatttaccgtatatttatagcagattttaataaagtgaatctttaatcagtgggggttttgtcaatcccccactgattatcagccctcattaatcgggctacccgcgaatagcaggataaagggaggaataatcaatgaaagatgaaacgaaagtatttcaatggttaaaagaacaaaatgctccttttgaaattcaactgcaaattttacaggcatttcaattgtataaagtcattgttgaaatggataaaaagttaatgttgtatgaggagagagtatatagggagagaatgtaatctcatccctgtaatatcgtttttagctgttctgtgcctgtaatgaattcgagtttattctctgactcaaagttataaataatattatgtagtaaaggactgtattgatagaagatagtaatgcgatgaatgagtaatggatcatgatgagaaataagtgtactgtactgttcatatacagatgtagtaaactcatgtccgaaatcataatatagtcctgcaaaatcaaaagcaggatcgccaatttgcgcatcaccaaaatcgataacacctgaaatacttttgttatgcttgttaaataaaatgtgatgatgagtaaaatcagtgtgaatgattgtgttttgaaaagtggatatagctaaacatgcaaagaaattttcaaataagcgatttaaggctagtttctgtaatgaagtaaggctagtagtgagatattggtttaattttgtttgtagctctttccagtaggtacatgttttttcaatagggaaacatagcgttgtaacttggtgtaaaggaatgctatgtagtaccgcaaggaaagtagctaattgtgtaataattgctttcagctctggatcctccagcgtggcaactgtgtctgtttttaatggttcaccatgaatgagagtatagtaactacaaagaggaacctcatcagattcatttttataaattaggtgatattgtggaacttcgatttcttgtagtgattgagtgagaattgcgcatagttctttttctaacggaattcgcatcgcatattcctgttttcgcgggaaacgaaacaatagctcatcatttactataactgctacattatcccatccttcttcattttgtttatatgaatgtatagaaagattaggcaaagcttcttttatataatgtttgtaagagtccataattgttcctcgtttctaagttaagttattccactttatgatatcagaattttctttctatatgttaaaatatagctatcattattaagaagggcgggagtattacgaaaaaaagactgttaatcagttctctatgtatcgcttttatattgttatggtcatataaagaggaggtttttgctacctttaaaccgattgatcagtacgagttaaataaggagttaaagaacaaaagtatagaaaatttaactcataatgaaatgaaaaaggtaggagagcattttgtgaccgagcaactatcagtgtttgggtctactaataaagaagatgtgaaacgaaaaggtgaagaactatttttaaatagagggtatgaacaattaatgggaaattattatccaaatcgttttcgagatttagagtataaatttacaaacgaggagatacgtgaagagaccgatgagagttttctttatcaagctgtagcgtacgttgcgggtactgaaaatggtaagagaagcgaaatgaaattgaattatgaagtgaaaattgtaaaggttaataatatatttatggtgctagaacaaaagcagcgcgtacaataaaggaaattcattgctcaatagaacattttggggtgtgtactacttaatgcggaataaaaaggccctcaaggaataaagggcctttaaagattttcattttgttgaccaagttctttttgagcaatatataaatttccttgctcgacttgtttaagggtatgaacagaatctcctgcatatcctttttgtgttttaacagttctttttgaacgattggaatcttgtttcttcatataataggccacctttcatcaaaaataaacgaaaatgataagtatgagtaatacagcagcgaaaatggtaatgcccattaaaaacgaagtgtttttatatttaggtggcttatgtacatcttgccgatatccaggtgaaatttcaggggcaaattcttcatcgaatgattgctttttttctttgtcgtccatatgtacccaccttcctttttcattatattatacgttacaagaaaaaatatgcataaagaaaacagccgctttattattagcggctgttttgtgttgtatattttcgttgtacttgaaagagacggataagtaggaaggcagcgccaaatgctagaccgataataagaccgatccaatagccttttgcggcccattctgtatacgttgctaatatataacctagtggtagacctattatccaataagcaattaaagtcataattagagcgacatttacatctttataaccacgcagagctccttgtacaggggttgcaattgcatctgaaatttgaaataaaatcgcaaagataagaaattcttttgctaaatgatgaacttttgcatctgtcgtataaatagaagcaatttgatcatcaaagaagtagagaagaatcgaatataataaagcaaaggtaagggctaatccaattccaatcagtccgtattgttttgcattatcgaaacgttttgcaccaacttcgaatccgaccgcaatagtcattgccattgctaaacttagcggagtcatatataacaaggaagcaaagttcatagctgcttggtgagctgcaatagttgtcgtactaaaattactcatcataagcgttaccgcagcgaaaatactcatttcaaaaaagatagcaaatcctatagggacgccaagctttaagaatgctgtccaactcgaaagagaagggcggtataattgtttgaaaatgttgaaagaggcaaaaggctctttcgtctgaataataatgactgtaataattaaaatgcaccaatatgttgcagtggaagcaattgccgctccaacaccaccaagttttgggaaaccgaagttaccaaagattaataagtaatttaatattacgttaattggtaatgatagtaatgtaataatcatcgttgttcgagtttttcctaatgcatcaataaatccacgtaaaaccgtgtaagtgaataaaggtataattcctattgcgataatacttaaaaattgagctgcaatacgttccacaggttcttctaagcgcatgccgtttaaaataggtgaaacgacgaagaaaccgatgaggataacaacgaaactagcacaaattgctaaataaactgcttgtatgacaacgtggggaacgtcctcttttttcttggatccaacgagctgtgcaacaatgggagtcgtggccattaaaattcctgttaacccagtactaactggaatccatatacttgttccaattgcgacacctgctaaatcagttgggcttgcatgtcctgacattgttgtatcgaaaaagctcatcgcaaataatgacatttgcgttacgaaaatcggaaaaaatagtaatacaaattgctttaacttttgtgagaatgaagtagtttctttcataaaatcccctttccgtataaaaaaacaaactcttactatcatacaatttaatcaaagattagaaaagaaatacgcgcctacaacatatgaagccaataaaaaaaggatgcactttgaaaagggataaggtattatgataaggtgtgaaaaaattacatattatttgttattaaggaggcactacttgtggctgattggttaattggtttaatcatgggtgctgttgaagggttaacagagtttctaccagtatcatcaacaggacatatgattttaacaggacatttaattggatttgaagacgagagagcaaaagtttttgaagttgtaatccaattgggatcgattttagcggttgtagttgtattttggaaacgattatggtcgttagttggaattgggaaagtaaaagaagggccatcgttaaatttattacatattattattgggatgattcctgccggggtactcggtgtattattccatagtgcaattaaaaaggttttatttggtccaggaccagttgtcattagtttagtagctggtggtattttaatgattgttgctgagaagttttcaaaaccaagtacagcaagaacgttagatgaaatcacatataagcaagcatttacaattggaatgttccaatgtttagcactttggccaggattttctcgttctggttctacaataagtggtggtttattagctcgcgtgtcgcatacagcggcagctgaatatacgttcattttagcagtaccgatgatggtagctgcaactggattagatttaattaaaagctggcatgtattaagctcggcagatgtaacgctatttgcaacaggatttgtaactgcattcgttgttgcgatgcttgcaattgtctcattcttaaaattattagctcgtgtaaaactaacaccgttcgcttattatcgtttcattttagctgcggtattctatttcttcattatgtaaaataaaaacctgccgagctcggcaggtttttattttactaatttttctatcatgttttccattacatgttcccaaagagaagtatcatcagctaatgtagcacggaaattagcatacatttctttttgtgtttcttcaaatgttggatcttctttttcaggtaatgtagcgcgcattgaagttactaattcttgtacttttggagcgcgtggtccaaagacggcttgttcatttccatctttatcaatgaaaataaagattggaatcgcacgtgctgttccatttgttaaatattgatccattaattctaagttttcatcgcgaattaataaacgcatatcaatatttgcaacttcagaaattcgtttcataacaggtacgcataaaagagcatcgccacaccaatcagcagttaatacgataacacgccagccatcattttgacgttcttctaatacaggaagtaattcatttggaattaaaaaattattgtaaatgtgtagtagctcgtattggtttacttgcatttcattcacatatgtatcaaaggacatacctttatcagcccattgttgtaagttcataattaacacctctttagtaagatttgctttcattgtaccaatttttatatagaaaagcttgtattcttactctttcttgtcacttaataattattattttatctttttggctgagatttgagaacctctcctcctcacgcattaaaatccccctttttctggaagttgacttcattttatcatgaaatacatattaaaaaactacgaattatgggaaaataagatgacaaaaagtaagatttcatgtaaaattattaataaggtttttatttaactaaatgaaataaaaggagctgtcaatgttgtctcaaaatcgagagcaattaatggaagaactatcgacaaatgtgtttgctatgtttcgcacattgcgtaatgatatcggaaaaatattcggtggttacataccgtggaatgaattcatcgttctgagaatattaaatcgtacgaataaagaaatggtatcgcgtgtagcaaatgaattaaatgtgtcgaatagtcatattacagctgttacagaaaaattaattaataaaggttttgtaactcgttcacgttctacatcagatcgccgagttgtgtatttagagattacagaacaagggaaagatttagttgcgaaaatggaagatgcgaaaaaacaatacttacaagaaagattctctgcactttcagaagatgaaatgaatgtaatgatttcaatttccaaaaaacttatttaagtgattataaataagaaaacgcttacgtgatgaaatagaaggtcttccttatatatgggaggtcttctttcgtgtgtaatagatgttaaaaaataaaatgtgtatgaaaaaagatagagcgccatactactaatacaaggaagggagggagaaatatgacgaatcgtaacggtagtaaagggagcggtaatcaaggatcaccaaagtccggccagtttaatcaggaatttagcactgaatttgaaactggtaatgataataaagggaaagaatatcgttctaaaaaagggagtaaatcaaaaaaggagtgaattaattcactccttttttgatttacgatgctgccgattgatccgtattatatttttcttctgattttgcgacaatcattgcgcaaattgcatcgccagaaatgtttacagctgttctagacatatctagaatacggtcaataccgataattaaagcgataccttctactggtagatttacttgatttaaaaccattgtaagcattacaagtccaacaccaggtacaccagcagtaccgatactagcgagtacagcagttaatacgaccatagctaattgcggtaatgtaagttcaactccgtatacttgagcgataaatacagtggctactccttgcataatggcagtaccatccatattaatagttgcccctagtggttgtacaaatgagcttatcgcttttggaacgccaagcttatcttgtgctgttttcattgcaaatggaagcgatgcattagagctagatgtactaaatccaattgccattactggcccgaaatgtttaaagaaacgaacaatactttcttttgctaatatctttaataagccaccatatacaaagaccccgtgaataatgagtactaacataacgacaatcatatacttgaacatcgcagcgacgcctgcaagccccattttaccaacggatgaagcgagcaaaccgaatgttccaattggggctaatttcataacgagattaacaagatacatcattaattcgttgccctgttcaagtaatgaatggataccttgaactcgttttcctaaaatagctataccgagtccaatcaatacggcaaaggcaatgatttgtaacatgtttccgtcagccatcgcttttgctgggttatctggtacgatatttagcaatgtgtcaacgaaagatgtttcagtttttgcaccttcatacttaagaccttctgttttaaaattaccgccagctcctggttttataataagtgcaaatgtaaccgctatagagatggcaaccgcagttgttacgagaaagaatgaaattgattttaaaccgattcttccaagttgtttcggatctccaaggccggcagcaccaagtacgatagaaataaacacaacaggaacaactagcattttaataagtcgaataaataattgaccaattgggttgaacacatattgatttagtggctcaaagatagatggagcagctaaatttagagtgagtccaacaactagacctagaaataatgcgattaagattgcttttgtttgtttcaataaaatcccccttttgtttttgcgaaatttctttctaaagcaattataccgaaaaaatccctaatttaacaatattttctgaatttttggtttttaggtgtagatagactgattttgtgtttggaaaataaaatagaccatcacataggatggtctagggaaggggacaatttatgtcaatttaattagggatggaagttgctttaagacactggggaatgtcttataaattagggaggaacaacttcaatacacccgaaatgggcagtagctaccctcttgctaatcgcaggaggatgctacacatcaagctgagatggtaacagcgggacaaattatggcaacaaaattagtatcaaacgagtttgttgcgatgcttgatcttggaaaagtagctggtgatttatcggctcgtacagttggtatcctttctgtattccttgtatcatttgcgaacttctcatctatcggaattatcgcaggtgcaacgaaaggtatcgatgaaaatcaatcaaatgttgtatcatcatttggtctacgccttgtgtacggtgcgacattagtaagtattctatcagcgattatcgttggtgttatgttataaaaaaagatggtcctagctcatagctagggctatttttatggtaaatttgcatgaaaaaaccaattaattaggaatatattaacatataaaaatcttttaaaatttatattgcatttcgtctagataacgcttacaatttgatttgtaggtggtatcaatttcagactttcaattatggtaggagagaagaagctaccttttataaattgcaatttatgtaaacgcttactgattttagatgacagttgaatagttttaggggttttaaattttttaacaacaatggtcagacgtcattcgttatacgttatacgaccaataactcgtgggagaagtggaggattcacatatgaagttcgtaatgtttctagtcggtttacttgtagtgtttgtactaggtttccttatcagttcagatcgtaagaaaattaaatataaaccaattgcacttatgcttgtcattcaattggtacttgcgtatttcttactaaatacaaaggtcggattcgtattagtaaaagggatcgcagatggatttggcgctattttaaaatttgcggaagctggggttaatttcgtatttggtggtctagcaaacgatggacaagcaccattcttcttaacagtattattaccgattattttcttagcagtattaatcgggattctgcaacatattaaagttttaccgattatcattcgtgcagtcggtttcctattaagtaaagttaacggtttaggaaaactagaatcatataatgcggtagcagctgcaatcgttggtcaaggggaagtattcattacagtaaaagatcaactaagcaaattaccgaaaaatcgtttatacacactttgtgcatcttcaatgtctacagtatcgatgtcaatcgtcggttcttatatgaaaatgattgatccaaaatatgtagtaacagcactagtattaaacttattcagtggattcattatcgttcatatcattaatccatatgaagtaaaagaagaagacgatattttagaattacaagaagacaagaaacaaacattctttgaaatgttaggcgaatatattatgcttggtttctcaatcgctgtaacagtagcggcgatgttaatcggtttcgtagcattaattacagcaattaacggtgtattcgattcaattttcggaatcacattccaaagcattttaggatatatcttctcaccattagcattcgtaatgggtattccaacatcagagatgctacaagcaggacaaattatggcaacaaaattagtaacgaacgaattcgttgcaatgcttgaccttggtaaagtagctggtgatttatcagctcgtacagtaggtattttatctatcttccttgtatcatttgcgaacttctcatctattggaattatcgcaggtgcaacgaagagtatcgatggcaaacaagcaaacgttgtatcatcattcggtttaaaacttgtatacggtgcaacgttagtaagtatattatcagcgattatcgttggggttatgctttaataaattaagaaaagcaatgagcgtaggctcattgctttttttgtttaacttgctttatccaagtttcttttaaaacgtggtttctctaaataagttcccagtctccacacatattccactggccccattcggtatttctggagccaataggtgctaacgaataattgaatcgtataaattccgatggttaaaagaataccgaagaaatagccgattttcccgtataagccaaatccatatgcgtaaaaaatagttgttgcgataatagattgcgctaagtaattactaacggacattttccccatgttcgccatgtatgttagtagacgggttgcttttttgtaatggaataataaaatgattgtgcttccgtaaaagaaggtcatagttactggtgtaaggccatcttgtaacataattaaaagcgggtgctttacgaacatagctaagattttaattgtaaaagagaagagaccggtggcaaaccatatttttttgacaccaggtatatgtttattgacctcaaatagccagccttttttccctacatacattccgagtaggaacagtggagacataaaaattattgcgaaaactgatatgaaaaataatccgaatgcaccgtcaattcccatgtaatcaaaaggattttcagtcaatctaaagttgacgtgatccatatagcttccagtttgatggactttatgttctttttcagtataaggtgcaaaatcatttatatttgtagatggatcagtttgataagacataagtgtaataagtgcgagtagaataatcgcccaaatgagcaaagttttcggttttcgattgatgaacatcattaagaaaatcccaattattccgtatgcaaataaaatatctccctcccaaacaaaagtgccgtgaatgtagccgagtagtaaaagaatgataatacgtcttatgtatgtggggaagaatttttttccttttgcgataatacttttttgtaacaaaataatgctaagtccaaatagaaaagaaaatagggatataaagttatgtgtgccgaagaattgaataaaccaattagcgcctttatcaagatcgccgaatagataagttggtttttcactggtgaagaacccgaattgaattaatgtcatattgactagtaaaatgccaaacaaagcgaaaccacgaattgcatcaacagcttctacacgttgattcatttttcctctcctcgtatattcgtttttatattgaaaataataccattttatagctggcactatgtcaaatatgaggaaatttaaggtgattttaagatagagagcaaacaaaaaaatcaccttaattcatgtattaaggtgattgaaatattattcagctggaggcgtaaatgtacgtttctctaattcagcatctagcataaacagtgcgtttgaatcgcttgtaatacgttttaatttttgaatgatgctatcgaatgaagcttcttcttcaacttgttcgtcaacgaaccattttaagaatgtaattgttgcatgttcacgctcgtcccaagcgatatcagataagttgtaaatacgtttcgttacttcacgctcgtgctcaagtgcgacttcaaaagcgtttaatacagatttgtattcgttattcggattatcaaatccagtaataatagcgcgttctccgcggtcattaatatagttgtaaagcttcattgcgtggaaacgttcttcttcagcttgtacaaggaaaaagttagcgaatccatcatagctctcagctgtacagtaagcagccattgccatataagcatgggcagagtaaaattcaaagttcatttgttcatttaatgcgtcgtgcaatttttttgataacataaaatcccccttagtattgtgacaataatattataccataattgataatattctcatttagatacttcgaaccttttcgaaagctttgtgacgtgtgcatccataatgtcttgtaagtctaaatcatatttttgcgaaagaataataaggttagatagtacatcgccaagttcttcttttagttcttgttttagctcttcttctgttttcgcatcttcatcagggcgatcgcggccaatttcaatagcacgaacgactcgtgaaacttccccaacttcctcggttaagaaatttaagcgaataaaggcattatactgtgaccagcttcgtttttcgtaaaattcctcaacccatctttgaaatgcaacgatatccatttcttcctcatctcctcaatatgttgtacaatgttcattgtatcataacaatatatagtttcggggtgtagggatgagaaagatttgtgtgtttgcaggttctaatttaggagagagaccagaatttaaagagcaggcaattcagttaggtaaaatgtttgttgagaacgactatgagctcgtatacggtggttcatgtgtcggattaatgggagaagtagcaaacgaagttcttcgtttaggtggacgtgtaacaggtgttatgccgcgcggtctattccgaggagaaattgtgcatacaggattaacagaattaattgaagtagagacgatgcacgaacgtaaagctaaaatggcagagcttgcagatgcttttattgcgcttccaggcggatacggaacgtttgaagaactatttgaagttgtatgttggtcacaaattggtatacataataagccggttggtttattaaacataaaaggtttttacggaccaattttgcaaatggttgaacgtgcagcagaagaaggatttatgaatccatcaaataaagaattgatcgtttcagcagagacagcagataaactgattcatgcaatccaaaattatgagcgtcctgttttgggaacgaagtggaagcaactatcatagcaaatacggaaacacatgtcgttttaatttaagatggcatgtgtttttaatttggttaaatatgttaatttttagatgtaatgtttttggaaaaggagaaagagatggaggagtttgtgtatttaagaccggtctttaaaagtattttagcagcatctattcttgttatgctaattgttttgagacagaagaaagagttgattaatgaattttcgctttggtttatctcggtattgtgtatcggtgtttccgcgataacgttgtttatgtctgggtttatcgttgatgagtataatctaggtggagatccacaatcgttttgtatgtttattgcgattggttgtattagtggtctgaatttcattatttattacagaaggcaataaaaagaggcattccgtattactttggaatgcctttattattttgattgctttgctttttatacaggtaccagccaccccagccgccaccaattgctacgacaacgaggaaagcatagtccttaacctcgacacgtatattgaaaatattagctataagtaagagaatcccaactgttattaacgcaaaaaatgctctaattaagtagtctttcaactgaaccactcccgtcatttaagtagtaaatgatgaatttggaaaagctaaagggtgtttcctatattttaacatagatgagattgtaatatattgataaaagtaggggagagaggcgtgttaatattgtcgtgatttgtcgataagtcgatataattgaaaaatcgctgatatattggatggaatcgccgatataattggataatcgctgatatattggggagaatcgccgatatgttggaaaaatcgctgatataaatttcatgtaccagcatgcgcgatcaatctatagaaaaaagcgactctgaacgagccgcttccgctttaaagtaatattcagctccggtagctagaatgttcggtggcttcgctttttcctgcgaggcaaagagcgcctctacgtcaaaagctccatctccctcacattctgagcaagctacctccgcttttaggtgatatccagctccagcggctagaatctccggtcatttcactctctcgctcgaagcaaaaagcgcttcaaggtcgagagctccaatgccctgcgattttgagcaagccgcttccgcttttaaatctattattgattcaagaacgcacgtagcatccaagcgtgtttttctagttctgtgtagatgcctagtagtaggtcagatgtcatttcatcgtcagagtcttgagcgatttccatgccttttttcagttcgactagcatcatttcgtagtctttcatgattgcttcgaccatcccttctgcagtttctccgtatgctgcttcttgaatagaagatagttctaagtattctttcattgttgctactggtttgccgccaattgctaaaatacgttctgcaatttcatcgatgtgagtagctgattctgtgtaaagttcttcgaatttctcgtgtaatgtgaagaattgaggtccttttacgtaccaatggaagttgtgaagttttgtgaataaaacgctccagtctgctacttgtttgtttaatacttcgattacttgtttgttcattatgatcaatctccttttgagttgttatgtgatatcaattactaatttataataattataatctagtaatctctataaatcaacccttttgctggaattaatttgaacaaattatgaactgttgtaaataaaaggccctattacggtgaagtaatagggcctttgtttgagatatggctcttgttctgaacgagccgcttgtgcttttaatgatatccagctccggtgactagaatctccggtcatttcgcgccttcctgtgaggcaaagaacgcctcttcgtcaggagctccaatgccctcctgttctgagcaagtcacctccgcttttaattgatatccagctccggtgactagaccagtcggtcatttcgcgccttcctgtgaggcaaagaacgcctcttcgtcaggagctccaatgccctcctgttctgagcaagtcacctccgcttttaattgatatccagctccggtgactagaccagtcggtcatttcgcgccttcctgtgaggcaaagaacgcctcttcgtcaggagctccaatgccctcctgttctgagcaagtcacctccgcttttaattgatatccagctccggtgactagaccagtcggtcatttcgcgccttcctgtgaggcaaagaacgcctcttcgtcaggagctccaatgccctcctgttctgagcaagtcacctccgcttttaattgatatccagctccagcggctagaatctccggtcatttcgctctctcgctcgaagcaaaaagcgcttcaaggtcgagagcttgaagtgtcctgcgattctgaacgagccgcttccgcttttatttgttaaacagccttttgtttttcttctacatcttgcccatcccagcactctgtattctttaagccagggatagagtttgcaacgaagacaggatcttttccttgtttcttttgcttcaaatagtctactaatgcagcgtaagcaaatttgctaaggaatgagatggcaattaagtttgtgaataccattagtcccatgaataaatcagctaaactccaaactgttttaagagcagcgattgatccgaagaataccattccgacaactgcaacacgataaatcattaaccatgttttactttctttaatgaatgcgatatttgtttcaccataatagtagtttcctagaagtgaactgaaagcgaataggaaaataataatcgctaagaaagtgcttgcccacggtccaatttgtgaacttaatgcgttttgtgttaattcgataccttctaaatttgatcctttgtaaagtccagaacataatacgataaatgctgttgatgtacatactaagaatgtatctacgaaaacgcctaacgcttgaacaagcccttgttttacagggtgagatacatcagatgttgcggctgcattaggagaactacccattcccgcttctgtagcgaataaaccgcgctgaattccgaacttgattgctgctccaataccaccagcgatggcttggtctaaaccgaatgcaccgttaaagatttccatgaaaatgcttggtaacatactgaagttgttaataacgacaaaaatagccacgccgatataaacgattgccattggcggaacaatcatttctgtaatacgtgaaatgctcttaatgccaccaaaaataataactgcaactaataaggctaatagagctcctacgattgttcgctctagtccaaaagcattttcaaacgctattgttactgtatttgcttgcactgaattgaaaattaatccatacgcaactgtaataagaagtgaaaaccagacgcccatccagcgtttgtttaaccctttttccatgtaatatgctggtccaccacggaacctacttccatcttttactttataaatttgcgcaagtgtacattctacaaaactagtagctgctccgataattgcgataaaccacatccaaaatattgcgccaggtccacccattgaaattgctaatgctacaccagctaagtttccgataccgatacgtgctgctgcacttaagcaaaatgcttggaatggtgagatgctatctttctttttttcttttcgattaaaccctttactaattaagctgaccatctcactgaaatgagtaatttggacaaattttaatttaaaagagaagtaaagaccgaagccgattagcattgcaataagaatatatgaccataaaatattattcgttacctcaaggaatctgctaaagatatcaaccatataatacacttcctttttttcgtaataagaaaattatatgcaaaaaatatacgagaatcaatttttctaaaaaattatgttacttaaaacatttttgtgttatgattatgttacatcgtaatatttttagaattatttacattttaaaaaactaaatttaaagcgagaaagtggggataatttgaaagaagattctttatggaaagtaagccttgagagtttgaaaatgagaagtaatatattttttatcattacatctttaagtatctttttagggtccacttattattacaataaaagatttccaaatcacaaatatcctgagtggttagaatttctaaagttgattggatgaataaaagacagaaaaacagaaaattaaaataaacaagttatggaggagctaaaaatgaatattagagaaagtgaacttccgggtattggttataagtttcaaatcgttacgaaaggtaatgaaaagatggtaattgtcattcatgatgatggtcgtagagaaatgtatcattttgattcagaccatgaagaaagcatctcaagtatttcactacgtgactcagaggcaagacaaatcgctgcaatattaggtggaatggtatataagcctagggcgttagaaaatgttgagatggtttttgaaggtttagcgattgagtggttcaaagtggagaatacagctccagcaatcggaaaaacaattggcgatcttgaaataagaaaaacatatagcgtaacaataatcgcggttatgaagaagaacatgaagaagctatttaatccaggaccagaaacagtaattgaagaaggagatatgcttgtagtttcaggtgagagagaagaaattaaaaaaatcattaatgaattactttcaaataggggggactgattagatggatacgttaatttttgaagttggtacagctttagttttagtggcaattgcagcagtaattgctgggaaatttaaattctcagtaattccttttctaatcgttcttggaatgttagtaggaccgcatgcaccgacaataggtgttatcgatctcaaatttattgaaagtgcaagtgtaatttccttccttggacgaattggggttctattccttctattctatctaggattagaattttcaatgaaaaaactaattaaatctggacgctctattgcgattggcggaacgatttatattttaattaacttttcacttggtttgttatacggatttataatgggattcccattactagaaatcttaattattgcgggtattattacgatttcttctagcgctatcgttgctaaagtgttagtggacttaagaagaactggtaataatgaaaccgaattaattttaggaattattatgtttgaagatatattccttgctgtatatttatcagttgtttctggtttagtacttggagatcacgcttccttcttaggtgcccttacttcaattggaattgctttaggatatatgcttctattctttatagtagctagaaaggctacgccgttattaaataaattgctcaatattagctcagatgaaatctttattattgtagtatttgcttcgttattcttcattgctggtttttcagaaacaattcacgttgcagaagcaattggagcacttcttctaggattagttttctctgagacagagcatagtgaccgaattgaacatcttgttgttccatttagagactttttcggagctattttcttcttcagcttcgggttaagtattgatccgttctcattaggcggagcgatatggttaacgttaggtgctgtccttcttacgataatcggtaactttgtagcaggaatgattgcaggaagacaagctggattatctcataaagcatcaacaaatatcggattaacaatcgtttccagaggagagttctccatcattatggctaatatcggtatcgccggtggtttaatgtcagtactgaaaccattctcagcactatacgtgcttatactatccattttaggcccacttctgacaaaagagtcgaagaatgtatataaattcttaaataaaatctttaagtgggatacgaagactaactaaattaaaaaaataaaagtacaagatatttcctgcttgtacttttattttggtgatgaaaacagtaaagagaggtacatgatgttaggagagttgattcattcggttttagtttttttagaaggacttggttattggggaattatgcttggattaatgctagaggttattccaagtgaaatcgtattgtcttatgcaggctatttagtatcaacaggaagcattacattttggggcgctgtcgcgttcggtacaattggtggtgtaattgcacaactattcatttattggattggtcgatatggaggaagacctgttcttgagcgatatggaaaatatattttaattcagaagaaacatattgattatgctgaagattggtttaatcgttatggaactggcgttatctttaccgcacgttttattccggttgtgcgtcatgctatttcgataccagcgggtattgcgaaaatgtcacatgctaagtttattacgctaactacattagctgttattccgtggtcaattgtgtttgtatatttaggttttaaattaggaacagagtgggaaagtattaataaagttgcggggccatatgtgaaatactttgcacttgttgctattgttagtgcaattggttattttgtattaaaaaaaatgatgaaaaaaaagtgattacagaaaaggaatctatgtcgacgtagattccttttttattggcattttttcaaggatgaaagaatacgtttaatatttactatattgtggcatacatatagaaaaagggtgcttggaaaggggaataaagagaaatggaactccagtttcaaaatgtatatcaacaggtagagaattggtatgtgttggattcggagcttccttgggatgtcaaaaagttgagagaggatttgttttctcttattgaagtatgtaaaacgcccgttattttttgtgatacgtgtgatgcaaatgatgtgcttctatcattaggggaagaggaagaagagttcctattcccagtaggtggtttttatcataaagaaaagcaattaattttcgtttgtatgtgggaagagtatgatcaagttctcaaaacgctactgcatgaattccgccatgcgatgcagcataagagagatatattgtatgtgggaagtgaacggtacgaagagcggtggattgaaaaagatgcgaggaagttcgcggagaggaaattggatgaatataagagtagaaagttaatgtaaagcatagtggagaaatagcgctgtgctttttatgcttattaaaaataagtatttgacttttattaagtttagttctaaactaatgatatgaaacgagcgaggtgatgaaatgaaaacagaagatagactagggctactattatggtttcgtttgtcacgcttttataataagagtattcgtgagacgaatcagcatttgaaaaaatggaatatatctgccgcccagtttgatgtgttagctcaagttggaggatataatcgtttaacgcagcaagaacttggaaataagctatttgttacgaaaggaaatgtaacgcagcttttaaataaaatggagcagcttgagtggattttgcgtgaacaagagggtactacgaaatatatttctttaacagaaaagggaagagctttatatgaggaaatcgtcccacctcaagaaacgttccaagcagagaagtttcataatttaaatatagaggaacaaaagcagttattaacactattaaaaaagttacagtaagaaaaaattttaaaataaatctcgaattcgagatagtatgaggtgaaggatatgtttagaaaagttgatcataaaaatatgggcagagcaaatcatggttggttaaatacacattttcatttttcttttgccaattactacaatccaaataacatgaacttcggagcgttacgtgttattaatgatgatctagtagcggcgcaaactggttttgatatgcatccacatcgtgatatggagattatttcttacgttgtagatggtgctttaacacatgaagacagcatgggaaatcgcggaacgattgagcgtggacatgttcaatatatgagtgctggcacgggtgtatttcatagcgagcataatttaggcgatgaaacgctgcgtttattacaaatttggattttaccagaccgtgcagatcataaaccaaactatggtgagtttaaatttgattggagcaagcgtgaaaatgaatggttccatatggtatcttcagtagaaggaaatgcaccaattcaaattcaccaagatgcgaatttatattccttatcattagaggctggaaaagaaattcattttccagtgaaagaaggccgtcaattgtatcttgtacaaattgaaggaagcagtgtaatcaatggtgaaacgtttgttatgcgggatgcggcagaatctgtagaagaagatattcacattcaagcgaaagagcaatcacactatttagcaattgaattgaaaaaacaataaaaggtttatagaaaagaggacatccgatagatgtcctcttttttggattggaattatctgaaaaatgtttctcaaattttcggtagaggtatcggctgggaaaataagaattgtataaaagtgtcaaaaatctttatgggaatggggaatgttatagtgaaaaagcaagttatttcatcagcattagcgttaactgttatcgtcgggggatttggagcgtttggggcaacgacaacgaaagcggaagaacaaaaaattcaatatcatcaagaatttaaaacacctgcatacataggtgaagaatggaaagcaccggaaggactagataaaaaagagacggtctttcaatacttagagagtaagaaagatatgtttaaattagcaggaaatattgaaaagcattttaatatcgttggagaagaaaaagacgctgaatctgatacgacacatgtgaagctagttgagaaacataataacattcctgtgtacggttctgatcaaactgttacacttgataaagagaataatgtaaaagcattcttcggacaagttattccgaatttagatgataaaaatattcctgcagctgcaagcattactgcggaacaagcagaaacgattgcaaaggcagatattgagaaagaaattggtaaagtaaagagttatgacggtgtgaaaaaagatttgtttgtatatgaaaaggacggtaattactaccttgcatacttagttaaggcatcgatttcaaaaccagctccaggatattggcattattttgttgatgcaacgaatggaaatgttattgagaaatataacgctgtagataacattactggatttggttacggagtattaggtgctagacaatcatttgaaattgctcaagatacgaaaacaggacaattcaacttgtttgatggtaaacgaggacaaggcattcatacatttgatgcagaaaatatggacgagaactggtttaatttattctcacaatggcttggatatacaggagaagaagttgaaagtaaatctaagttcttcgaagataaagctgcagttgatgcgcatgtaaatgcagggaaagtatatgattactacaaaaagacatttaatcgtaactctttcgatgataaaggtgcgaagcttatttcaactgttcacgtaggtacagcttggaataacgcagcttggaatggtgtgcaaatgatgtatggtgatggagatggaaaaactttcattccattatctgctggacttgatgttatcggtcacgaattaacgcatgctgtaactgaacatacagcaaaccttgtttacaaaaatgagtcaggggcgttaaatgaatcgttatctgatattatgggtgttatggttgagaagaagagctgggatttaggtgctgatatttatacacctgataaacctggtgatgcgcttcgctctcttaaagacccagcgtctattccaaacccattaaaaccaagtgaaggttacccagatcactatagtaaacgttacactggaacagctgataatggcggcgttcatattaacagcagtattaacaataaagctgcatacttagtatctgaaggcggggatcattacggtgtgaaagtaactggagtgggccgtgaagcgacagaaaaaatttactaccgtgctcttacgaaatatttaactgcaaactctgacttcaaaatgatgcgtcaagcggcacttcagtcagctgaagatttatacggtaaaaactctaaagctgtacaagctgtaacgaaagcttatgatgcagtaggtgtaaaataataagagaaaagacctgacatcctagtcaggtcttttctttatcccgctatccgcaaatgatgaaatttccactttatttagtcgcgaatacctaatgcgattttcgccatacgtgacatacgttctttcgaccacggtggattccaaacgacatttacttctatttcattaacttcaggtacgtttgttgataatacttttttaacgtctgatacgatttgcccagccattggacaaccgatagaagtcatagtcatcgtaatgacagcattattattttcatctgctgtaacatcataaactaatccaagattaacgatatcaacacctagttcagggtcaataacagcttctaaattggcaagtaatttattttcaaatgcttcttgtgacataagcagcccctcctacactttaatgatatcgattctcattataacggaaatgagcataatgtgcaggaaatgagctcgaaaaaatatccctcttcgcaagagggatattttttgaacatctattctgttttaaaatgagatacgagctgatctaactcttcaactgtttgtttcatttttctagcagttactgtcatttcattcataacgataactttctgttcagcagattgtgccgttgcggcagtttcgctggatacttcagtagagatagaagcgatgttattaagtgaagcattcatttcttcagcacttgcagccatttcttcagcagttgctgatatatcttgcatttgagtagatactttatttacttgttccacaattgttgtgaaagaagtaccagcttcacgaataacattgataccttcaaatgcttcagaacggccttgagacatcatagagctagcagtttctgtatcattttgaatttgatgtagtaattgattaatgtctgttgcagctgttttagattgttcagcaagttttcgaacttcgtcagctacgacagcaaatccttttccttgctcgccagcacgagcagcctcaatagaagcatttaaagcaagtaagtttgtttgctcagcaatattagaaatagattgtacagcagtatcaatatatttcgtatgagtgattagacgttcaaccacttctgacgtagcatttacagcttcgtgtattgttgtcatttgtgaaacagatttttggataaccgtacttccatcgctagcatgttcagatgtggcaacagcaagttccgctacagatgaagcagattcagcgatgcgctgaacacttactgccatatcatccattgcagttgaactttcttccatactagaagtttgtgattgaatacttgcatttaagttggacatcgagctttggactcttaatgtcgcctcacgtgatgtatttgttttttctagcatattttcagaagcggtttgcacttccactgatgttttttgaacacgattaatgatatgttgtaggttttctaacattttattaaatgatgttgcgatagcacctatttcatcgttgctatttacttgtagacgtgccgttaagtcaccttcttgagaggccaattcttttagtttcgtgtcaatttgttgaattggtttcaccagtttaccagagaaccaccatgcaagaataattgcaacgacaatacaaataacaagtgatagaaagactgcatattcaattcctagtgaagattgatcaatttgttcaatagattgttcacgtaatttagcttgttcattactgtactttgtgaagtcaccaattactttatagaccgttccgttttctgaagaagctacttgtaaagcttcttcccatttttgttcttttgcaagagtgaatactttttcttcaacgaactttctccaagtagaccctaattccattgtactttttacggacgaagaaagatttggattagaaagaagtttatcttttgaatcctcaagacgtttactcatctcattaaacttgtctaattcgacttgatcatgttgtagtaaataaccccttaaagcagatagctgtacttgataagcgtctccacgttctttcaattctgttgccagtggagaaatttctttttgtaatgtttcagctttacgagattggtcaatagcaaaaaataaaataaaagctaaggcgatgccaaataaagcgcaaatcgttcccatcatgaacataagtttttttctgatacttacaaaattcatatgattaaaagcctcctttgtgaaatcttagtattagaattaataaatgtaaaaaattgaaagaaagctttactccagttggaataaagctttcttatttcctttaggaattatagcagacggaatgagagatagaaagagatattttaaattgaaaaaagagagactgtaaaatattctttcctatacctttgggcttgtgtcattacaagcgaaaggttcactttaagcgtttgttttgaaatgagagacgagaacttcaagttcttgtacgattgttttcatttcagatgatttgttagccacgatactcattttgtttacttgatcaccagctgaatgtgctgtttgtaatgtttctgcagcaacttcatttgaaatagaggcgatattatttaaagctgcgttcatttcttcagagcttgcagccatctcttcagcagttgcagacatttcttgcatttgcgtagagactttgttaatgtggttaacaatttctgagaatgaagatccggcagtacgaataacagtaattccttcagaagcttctgcttgaccttgtgtcatcatgtcatttgctattttagtatcggcttgaatttgatgcagtaaatggttaatgtcagttgcggctagttgagattgttcagcaagttttcgaacttcatcagcaacaacagcgaatcctttgccatgttcaccagcacgagctgcttcaatagaagcatttaaagcgagtaaatttgtttgctcggcgatattcgaaatagattgaagtgcagtatcgatatgatttgtatgtgtaatgagtcgctcaactacttgtgatgtagcgttaacagcttcgttaattgtgtgcatttgtgtaatagatttctcaatgactttattcccatcatctgctttttctgaagttgtaacagctaaactagtaacagaagaggcggactcagcgatacgctgaacactcgttgccatgtcatccattgcagttgaactttcttcaatgctagaaacttgtgaacgaatattgtgttcaagagcattcatagtttcttgggtccttgcggtattttccatagaagcagtcgtttcgataaatacattttcggaagcttcttttacacttgttgatgtttgttgaacttgttttattataagctgtaagttagtgagcatttgattaaaggaatttgcaatgtcacctatttcatctttacttgttacgtgtaatctagccgttaaatctccatcttgagaagctaattcttttaacttctcatcaatttgtcgaattggtttaacgagtttaccagagaaccaccatgctaataaaatagacgttaatgtacatgtaatgagtgagaagaaaataatatattgaataagtgatgaagaagactcgacgtcagcaattaatgcgtcacgtttctcattctcttcatttgtatatttattaaaacgacctaaaagatcatttacataatctgtttgtgctaaagcaattttggatgcttcgtcccattttccttcacgagcaagaggtagtacctcattatctatgacgctacgccattttccccccattaaaatagcttctttcattccttctgggagcttcttgtcacttgttactttctctctagtatcagctaattttttcccttctcggttgaacttatctaatcctttttgatcatgtgatagtaaatattcttgtaaaccagcaacttgtgcttggaaccaatcgccacgttcttttaaaatcgtcgctctttttgatacatcattttttaacgtttcgatttcacttgcttgattcatggcgaatgaaagaataacaataagagcaatgctaaataaagaagaaatgcttaagagtgtgaacagtagtttttttcgaatactaacatatttcatcgttacccctaccctcgtttaaactgtttattatgatttatagatatttaaaacgaaattaataaaaacattattatgaagttattaatctgttcaatgaaaattatagcagataatggaaggagtcagattgatattagaaaaagttcttaaaatgtatacatttgcatatcataaaattcataaataaatattagaaatgctattgaaatttgaaatgacatcatgtatacttctaattagttgataacgattatcagtatcaactaaaacattactcttcgttatgttggtcatacccctttttgacgacgtaagtcagagacgaaatgttgaaatatcttgtgtcctattctacagaattatggtaatctccaacctcaacttatatgcgtgagcatgcaaaaaggatcctatccgtgaagggatccttttttgcatgctgtcgcaattattgtatatagaccagggatacgttcttcgattctttccggtgcagtagaagggaagagccatctttgatgaggtccgtgttcttcaactagtttttcaattttaaaatgttcttccgcgagtgttgtaatgatttctcctaacgtccagcgacggatggttgttttaggtagcgattctttctgtgcttctgtaagaaggatgctataagcaacatcatcttcaattaattcttcatcgaaataatttccacttgctcgaaatgatggatggtctactcctaatagctttgtgtatattggatggtaatcgcgaaggataagtattccaccgggctttagtagttgagagattgttgtgaaaagtggttttaaatctagaaagtaatgaagtacaccaagttccagtaatacgatatcaaatgatttggagagatttacatctagtacatcagaaacgatgtaatgaatagagacgcctgcggcatcagcaagttcatttgcatattttgcattacttgctgaaatatcaacaactgttacgtcagagcctaaaagggcgagtgcgacagctttatttccttttgagccgagtaaattaataatacattttccttttggggattttatgtaaggtaaataatgtgctacttcgcgcgtgggatctttcatgatttttttcgcataatcagctggtgccccgtggcgattcgtccaagcttcataagcagctgcattccagcttttttcatttatagtgcttagttgtttttgattcaatgttatcactccttttgtgaacgtatagttattcggcagggggatgggatttccttttctttctggataaaagtttgatttttccgtgattaagtcgtacaatactttttatacgtaaaagcgttgaaaaggaaaagtaggatgaacacattctttccagagagcttcggtagctgagaagaagcaagaatattcatttgaacaatggcctttgagcttcgtcctgaacttatcaaatgataatagtaggcggcgacgagagttggtactcgttatcaaaaccacagtataagagcatattgctccgtacttgttaaggctaattatgtgagtaattagcgaaataaggtggtaccgcgactgtttatacagccccgcccttatcttttttaagataagggcggggctttttatatttaaaaggaggaatgtaagatgagtatttttattggaggcgcttggccgtatgcaaatggttcgttacaccttggccatattgcgagtttgttacctggagatattttagcgcgttattacagggcaaaaggtgagaatgtgctgtatgtttcagggagtgattgtaatggaacaccgattgcaattagagcaaaacaagaaggtgtgacagcgaaagaaattgctgataagtatcatgaagagttccagcgatgttttcgtagccttggttttacttatgattgttatacacgtacagatagtgagcaccatcatgaaacggttcaaaatgtttttttacgtttattagaagaaggacatatttataaaaaaacagtggaacaagcgtattgtgaaacgtgtacacagtttttaccggatcgttatgtagaaggaatatgtccacattgccatgaagcagcaagaggagatcaatgcgatgcttgttctgctattttagatcctctcgatttgttagaaaagaaatgtaagttatgtggtagtacgccatctgtagaggaaacagagcatttctattttgcattgcatacatttcagcagcaaattaaaagagctgtagaaattgccaaacaaacagggacatggcgcgacaatgcgattcaactaacagagagatatgtaaaggaaggattaatagatagggccgtatcacgtgatttaccaattggggtaccaattccagtagaagggtatgaagataagaaaatttacgtatggattgaagcagtgacaggctattattcagcgagtaaacattgggctgaagaaacagggaaagatgatcaagagttttgggatagcgaagcgaaaacatattatgtgcacggaaaggataatattccgtttcattccgtcatttggccagcggtattacttggaataggggaggaagcaatcccgcgtcatatcgtttcgaatgaatatttaacagttgaaaaaagaaaattatctacaagtaaaaactgggcagtatgggtgcctgacatattagaacgctatgatccagattctattcgttactttttaaccgtcaacgcaccagaaaatcgcgatactgatttttcatggcgggaatttatttacagtcataatagtgaattattaggtgcatacgggaactttgtgaaccggacattaaagtttatcgaaaaatattatggtggtatcgtgacgaagggaagtattgaggtagagctgaaagataaagtagaaggattatataagcgtgtaggagaggcgattgagcaaactaaatttaaggtggcgctagaaacaatatttgatacagtacgttttgcaaataaatattttgatgaaaagcagccttggaaacaaagagaagatgatccagtttcatgtgaagaaacgatttataactgtgtgtatcttatcgctaattttgcccatctccttgaaccatttttaccattttcaagtgaaagagttcgaaacacattgtcgattgtgaaccgaaattgggaaccgcaaaatacgttgccaagtagaattgatagcgtacagccattatttgagcgaatcgatgtaaaacaaattgagcatgagatagagaagctgtatggagcggtaaaatgagatagagaaaaagacctttcaagtaaatgaaaggtcttttgttatgcagtatgattctctttcttatctttcaaaaagaaaagtacagcaaggattacaagaataatagctgcaatatcatacgttattttaaatgtagtattaaagtttaagtactctacgaaaggagttttcactgctcctgcatatatacaaacgggaacgagaagtaaatcgtaaaatttcttttctttcatatatcttattaggaagaagatacacataatagcaaaaaatacgatgcttaaaatagtcatttatacctccagataaatttacttattttaattgcagttatatcttttatataaattctgtattttttcaagcgctgtgcacgcgattgtgtttcctttctttcctagccgtaagcagctgaggagtgaagatcccaaccaatataaaaataattccaatccactgcatgaacgttacgacttcatgtacaagtgtaattgaagcaataatagcagttggtaattcagctgcacctaatatcgtactaagccctgttccaacctttggtacaccgattgaaaaacaaatgacaggtacgacaacaccgaacaagccgaggaagaaagtatatttccataggccagcttgcaaagcaccgtctgttaaaaaggttggcggaaagaataggcatacgataagagtagcacttgttgtcataagaaagcttttcgtataaggcggaacatccgtagcgacgcgcccgcttgcaaaaacatagaatgaaaaagagacagcagctaatagcccaaagataatccctttcgtagaaaaactttgtccgaggccttcaaatacaccacctgcaaacaatgtaccagcaaataaaataaggatagatatgatcttatcgtggcttggaaatgttcgatttgcaatggcttcgataatgacaccaatccaagtgaactgaaagagtaggacgacagcgatagatgcgggtagttcttctacagaaatagcgtaaaaaatcccagtcatactcattgttgttccgacggttagtaatgaaaaaaattgtttttttgttactttatgatgtgaaaagaaaagaacgagtagaaatagtccaatccatccgaagacatattgtccccctaggagttgatgtgctgaaaatccatttatgaatccgagtttgaaaatagttgaaagtatgccgtagctgcaagcaccgaataaaacgagcaatgaatatttaaacttttccataaaaaatcctccttttaagtaataaaaaacgcccgctatccaaataaggataacgggcgaacgaaacagagtaagacactctacaaaattccgccactcacacatgaagtatgagtttggggtatgtaattatagtgaatgttacattgcttttgggaatacaatggagcattttacaccttgagctgtgttttgtatcccgtaaggaaactgatgtttatctaatatttgtttcacgatatataatccaagaccactaccttgtactaacccgtgtttatcaggatttgcgcgatagaaaggctcaaataaatgagcaagtttatcttcatcaatttgtgaacctgtatttaatacttctaatgcgtaaccatttggtttttcataaagctttatatatacgtgctgatggtcaattgtataatgaattgcatttgaaataatgttaaaaatagcagtttgaataaatttaggatcagctaaaatttgtacgtcgtgtttaatattagattgtacatttaattgttttacagatacaaagtaatctactttcttcataacatcctcaataatattagataaagaaatgacttctaaattcggtttaaattgagggttttgtattttggataattccgacattttttccgttaatatgttaatgtcttgcatcatctcgtaggaacgtttcaaatacttatctctatctttataagctccaattccgtgaatcatgccatctagttgtcccatgacggctgcgattggtgtttttaattcatgggacaccatagacataaattctttacgagattgttctaattgttgttccttcttgagctcgtttcttaaatcttgattgcttgcatgtaaattctttacaatatttggtacttgcgaagcggctacttgcaaattaaaatctgtttgatctgcatttttgttaagtagctttttatcggagaaatcaagattcataatatcttttaaagcatcactcatatattgaaaaggtttggcaattagttttgtataaattaatgatccgagtagtgataatgcaagcattgtcgcgccaatatgtggagctaattgctgcaacgcatctgctaactttggattatcatttgtatcatttgttttacttgctgcattttgtgtatgtaaggcatcattattagcggctttcttttctgcttctgtaggcggattagaagtgctatttttccccgaaagattttgtgtatgttcttttgcctttgcagtttggctaggctgcaaaaggtgattgatagctgtagaaagagatttataatctataatagaagattggaaattagaaatactcccctttgacacagctttattttgcttcgttttacttccgtcgttttgcttatctgaatcggcctgttctgtagtcggcgttccattttctttcgcaaaacgttctttatcgtagtttgaagctagaaagtaaataatttgataaagacaaagtgataaaagaatacaaaataataaggttttgatgaaaatatttttggtgatgttgtctttgctacgattcgattttgtagccaatgcctttcaccgttttaatataaggaattcctaatttttttcttaagtttttaatatgtgtatctataactcttacatcaccataatgttcatagccccataccttattcaacaaatcacttcttgataatacttttcctcgattttgcagtaaagtataaataatttcaaattcttttgttgtcaattcaatttgattaccatgaacataagctgcatatgctgtagagtttaacatcaattcatggaattgtagtatagttgcagcttctgcttccttcgttgctgcccttcttaatacagcctctacacgcttaataaatacagtgtaatggaacggtttcgtaatatagtcatcaatacctaactcaaatcctttaatttcactttcttcattatgtaagcctgttaacataatgattggtacatcagattgtcctcgcataattttacaaatactatagccatctatatctggtaacattacatcgaggaggacaagatcgtatgaatttttttggaaaagaagaataccttctgttccggcaccaactacatcaacggtaaagttttgtgccattagaaattcacgaatcagttcttgtatatctgggttgtcttcaatcaccagtatatgcgtcatagtaacacctcctaaataacgctttttactgcaatattcgaattcatcatttttcgagtgactcagattgtttatacatataataagcccccgctataaaataatcatgaaggtagcaaggggaatagtttagtgttactgaataattcagaattacagtagttctattatagtatgtattataaaatttataaaatattataactgtataattttaatatctacgtttatcaatgtttagatattagctaatcaaatctattcctattatatatgtaaatacagttgttttgctactgtaaatgaataaataaaataagccaagacataaaattcttggctacacataaatcttgtttttaggctattttacagtgacagtagcttgctgctgaacgcgctcaaataaccagtgtatatcattgttatacatacgaatacaaccaagtgttgtccatttgccgattgcttgattattgttagttccgtgaatcgcataagttgttccgtaagttcctgccatatttaatccgagccaacggtcaccaagtggattacgtggatcgccgcctttaatttttcctgtataataagggcggtttttaattttatttacgatttgaaaagtgcctttaggtgtaggtgttgcagcttttccagtagcgacagtaaaactttttataaattttccatcctgataataatccattttatttaactgagtgtctacgattaattgatctttcgttgtagctgcctctgcactagcgaatggaagagttaaaaatcctaatgataatagtgcgcttaataataattttttcattgttattctccttttactatcgtaatagtcttacatacaatgaagttgtaatcctcgtaatgctttatttacattttcatctaatgtttcaaagaatgtagtgattttgctgttgtgtttgttgttatcaataagtaatctttcatttaataaaagctcaccacgtagtccaaaactttgaacttgaatatttagctcatcttcattttcagaaatgattggtaagaaatagtgaaaagcttttgttggaatgatgtagcttttgccaatcatgctttcttgatttgaattaatccattttttcgtgacaattttaatattcttttttgaaacgataaaagatagtgttgtagattttgttaaacttacgtcaaattcacttgtttcacatatttgtaaattaaaaacggtttcattttgatgagattcaacatttgtattaataaaatcgtgcattttatatgcttccatttcgtattcacccttttttcaatttcgaaaaacgacttatatttattcaaattaatgcttagtcatatattggttaaatttttcaacaaattccgatataatcttacaatacgtatatgaagctaatatgaagttagcatgagtttgtgatggttttttattgagaacaaaataagaaagcttttttagtgctaaaaaatggataaaatctgcatgttattaatgcgtcttttcgctatttcgacttggaaaataatttttactatttaataaagaacgaaaatcattagtgtgacccttacaaaaatgtaataaaaatgtaagctattgtgatagttatttcgacaatttttttatacaataatagtaagaagttgtacgtgattgaaaggagagatgacatggaatggattcatgaattatttcagcaatacgggtattatgttgtacttgtcggcttgctgttagaatatattgcacttccgtttccgggagagccaacattagcatatgcgggatttttagcacataagggtgatttaagtttaccgattttaattattctatcctttattgggacaagtgtaggaatgacgattcaatactttttaggaaataaattaggtatgcctttcattcaaaagtatgggaaatacgtatttttaacacaaagaaaaattgacttaacgagaatgtggtttgataagtatgggtacttcctaatttttattggtttctttattcctggtgtacgtcatttcacaggatactttgcaggaattattaatttaccattccgtcgttttgccattacaatttattcaggcgctctattttgggtatcattcttcttaatcggtggttactggttaggtggaaacttacatgatatctttggagtgctagaagatcatatcggtaaaatcatttttggagttattgtgattgtagcggttacgttgggtattcgtttccgtaagcagttaaaacgagtattactacaaaacgcaagttaatatgaaatccattctatgtcagaatttaggaaggcagtgcaaaagcactgccttttttattttatttttaagactatgtttaatgcacattttacattctttataggaatttgatacaggataagaaataagtattttgtcaattattatagtcgtaatgacaattataattgacaaatataaggatattatttacaattgtaattaaataaatgaaaaagagggaagacatgaagcttcaaaatcgagtgagggaattgcgagcaaagcatcgtttatcacaaggggatttagggaaagcgattggatcatcacggcaaacgattagtttaattgagcgtggggattatgcaccatctatcgtattgtcgttaaaaatcgcacaaattttcaatgtaccggtggaggaaatatttacgttagtagagggggaagaggacgatgaagagtaagagaaaaaaacaatttgattctgtggggaaaatagcattaagtatgataggaggatttttaacgtcttatatagctttaaatttactctcggatgaaccgagaaaattatcatccaatacatttataggtatatgtactatttttggaattttaatgatgtactatacttggaagaatacacgtatgttagcagaggcacgcgatgaagaagagagcgtacaaggcagaaaattaggcattataagtatatatttacgtgtaggtgatatagtgacgcaggcatggtttgtatatgcagttattacatgtagacgtgcactgttgcaggatacaaatgtttcatttgcggtgtggaatttagtagcttctattgtttgtttaactactgtagtaattatcggactcataacaaaaaatcgttataataagctatatcctgaacaaggtgtaacgtatatggaatctatgaaaatgtggacgaaaaacgcagatgaaggattaaagcacattgtgcatgaggctggatataaagcatatgaatttaagaatacaatattggcatatgtatggtgggctgccgttatatatacagctgctagtaatatcgattttgtattaattggcttaatctcatttatttggatattgcatcttgggaagttcatgtacgaaatgcaaaggaaaatgatttattaaggggagaaaaaggtggatattttaagaaggccagctggttcaatgacagtggcgttaatgctgtccattttatacggagtaatccgaactgggaaattagaagtaattttgaacctatgggcaatagttggaatttcattattagtgttagccattcatgagctaggacatgtagtatttggtgtaataggtggtttaacatttaaatttatgacagtaggacccattactattcaaaaagaaaagggaaaattacgcattcgagcaaataaattatgggcttactttggaggcgttgcaacactagtaccaccttctatagagacaccgaatctttcgaaaaaatgggcgtggctcactttaggtggaccaattacgagtttactgtttggtattacttccggttacatatacatggtgagttattatcaatatcttttatatttttcctttttccattttgcaatctttgcggttacaattgtgccgataaaaggaacgcttatgagtgatgggatgcaatttcttattttaattaaagatgatgaaagagctagaaatcatttatatgagattcaaatatcgagtgagttatttagttataaaagaccgaaagattgggatgaaagattagtagaattgagtgaggagaaaataaaagacaataaagggataagagagataatgagtagacttatgcttgtcttttttgctcgtgcagatcaagagggaatggaaagagcgataccgtatatagaaagaattgttcaactacctgtaacgaaagaaaataagtttttcgttagcagttttcatagttggtatcttttatataaagccctttatcagatggatagtctttctttgcaagaagcaaaggaacatgcaaaggctattacaaaaatggacttaaacggatattatcgtacacaaggaattatcaaatatttagagaatgatctagaagcttcccatacttatatgaagaaagctgataaagaattaaagagcgccgagaagagtgagatgggatatttacaattagaaagagaatggtttgagcagttgaaggtgagggtatcttacgatgggtgaggtatcctcttttttctatgtcatcttatgccgttccataaatagtccggggcgagtaaaatgagataagaagagcaaagcttggaggaagtaaatatggaaattttatcaattattttgatagtcttgctcatttatgttgtttttaaagtggcatatgtagcattaaagatactcgcgatcctattaattatctttttaatcgtagagttcggcagtaagttgcttgggggatagggtatgttgtgcgtttcgagtgtcgaaggttgtcgttaaatcgatatcttgtgttgaaccgttgatataatgaaaaaatcgttgatataagtggagaaatgatcgatatatttgaaaaatcgttgatatattttagtgaatacgaagtggggtatgtggaaaagaagttgccgttgggtagcttctttttattgtagtggcagggtatagagcataaataggttgccgaaaattgccggtaagtcgatagcctgtgtcgaacggtcgatataatgaaaaaatcgctgatataagtggagaaatcgccgatatatatggagaatcgctgatataatccggttggtactggatggggtatgtgagaaagaagttgccgtgagggcaacttctttttatcgtgatgcggggtatgcaaaccaacataaaaaagctggaagagtatcttccagcttaagagttactttcaatttgacgaccgctatcttcttcagtgtcttgtaataggttgaatacgtctgctaggcagaatgcaatgaaccaagtccatagaccgtggaagaaagctgagcttaattgaagtggtaatgtatagtttgtcattgagtaggaaatacatccaccaacgattccgatcattgttaataacattgttttttgagcattttcttctggattgaagaggaagtaaatgtatccgcctaaaattgaagcgcttacaagcgtttcgattccattaaagatgatattctctccaagctgagtgtttgtccagaagcagattgttccgccgataatagcaaacaggacagctattgtatatcgtatatattgattcatatgttcatctccctatgtaataagatgatttggaagtcaaaaaggtaggtatagtatattgaagtgagttttaattgtacgtatctttttataaaaagatcattgaagagtaactaagatgatcggttgtttaaaccgttacgtgtatggtgtctgaaatatacccgactgctcgtttctttttgcttgtaaaataagagaaacttccaagtctatatactcttttttttgtgagtctgctttcattataacacatttagggacataataatagaattatctgattttgtaataagtgtaaaaaataaaaagcgtaaggaaataccattaacggtgcagtttagtggaagaaggattttaatttattatgatgaaatatgtaatcaaggtgagatctaagaatgaggcttaaatactataaaaaatgttttatagcatgaatgtaagggaggagagctaacttggagttcacaacagaaagattaataattagaccttttaagagtactgatttacaggatgtatttgctatttataatagtgatgatacatgtaagttcctattacataataagtggactcatgaagacatgcagaaaagatttaataagaagctagcaaataatgtacttactaaagaaacaatattaagtttggcagttatatacaaaactaaagtagttggtgatttatccgtatggtacacaaatatgaaagacactgttgagattggttatagttttgcaaaggaagtagctgggagaggtttggcaacagaagcagtaagtagtttggtattgaaattatttaatgaatgtaatgtacatcgtatacaggctaatcttgatgcacgtaatacagcttcacaaaaattgtgtgaacgaataggcatgagaaaggaagcccatttcatacaagatttttggaataaagaggaatggacagatagtattgtatatggaatgctatcctccgatttgtagtaataaacttagtgattttattatgctaaaaggtacgttagttgaataacaaagggcataacatattatatatgactaatatgttatgccctttaatttattaacctgttttatatgcgtttgaaacggccgacaatttcaactgtttcagtaatgttcataaatgctttgttatccacttgacggataatacgtttcatttcgcctaactcatagcgagtcacgacagtgtaaatcatttttttcttatggtttgtatagccgccgacagcgtctaccattgtcaccccgcgtatgccgtgatgtagtagtgcgctttttatttcctcgcctttttctgtaatagtcattatcgttaatttaatatgtttcgtatgcacagcgtcgataactttgctgactacaaatcgactaattaacgtataaagtgtaatatcccatccgaaaataaaacctgctgctacaagtaagattaagttgaatacaaatatgattgctccaattgaaacatctcgatatttcgctacaatcaatccgacaacatcaaaaccacctgttgaagaagcaaatcggaatataattcctgaagctgctccgcagataacaccaccgaatacagaagaaagtaaaatatcgtctgaaacttggtgtaccgggataatgttcatcgctaacgatgacacagctacaaagtacgctgttaaaaaggttgtcttctttcctaagtaaaagtgacttaaaataagaagaggaatgtttagtaaaaagataagtgcaccgatattgtagtgcattaaataaccgataatcatccctacaccagcgaatccaccgctaatcatattatgcgggataaaaaacatattcatagaaattgcatacaaaatagaagctataaaaataacaaccaactgtatcataaattctaagtgaaatgttttagctgctgggaaggataaaaaggcggtgtcgggaacgtaatcggcgtctcctagttgacccatagtatgtttcatctccatattcatttttgattacaagaagagaataaaggttttttcaaaaactggcaatagttttattataatgcaaaaattttataaatttctaataaatcaagcctattcattgatgtgtgtgaatatgctaaagaaagcgaatacaacgtttcttaattattgttttcttgagaaaatatgcaaaatactttttttgaaaataaaaggaaatagagaatatttgcccgatgtgctaaaatgaccttattaaggatgtgaagcgatggaatttttattgcaggatgcaattctatatatatcgtttgtaacgacagcactttgcttattagaagttttcttccttgctaatgtttctcgctttgtgcgtcaacaagcatcaagcggtagacaaagagcttttgcgttagttgatacatgtgaagatagtgcgggaaatgtaccgctattttcaattttttataaatatggaatgattcgttccgtacgcagacaagaatcaagtgaagagaatgatgaggttggtccgtatacaccaatgtttcgctaaataattacgaaacattggaggaatgaacatgttaaaatcataccgagctgcgctcattagtttatcagtagtacttgtttttgttttatccggctgcagtaatgcaggcacaattgattcacatagtacgggaatatggaaccattatttcgtatatccaatctcgtatatgattcaatttgttgctcatcatataccgggagctagcttcggggttgctatcattattatgacgctcgttattcgttcagccatgattccattagctgtttcgcaatatcgcagccaagcgaaaatgaagaaaatgcaacctgaattgcagaagctaaagaaaaaatacggtgatgtaagcaaagaccttgaaaaacaaaagcagtatcaaaaagaaatgtcagaactaatgaaatcaggcggttggaatccacttgctggttgctggccaatttttatacaaatgccgattttctctgctttgtattatgcgattagcagaacggaagagattcgcacatcttcgtttttatgggtgaacctaggacatgcagatccatatcatatattaccgattattgcagcgttaacgacatttattcagatgaaagttttccaatcgaatattacacctggagaacaagtacagatgctaaagatgcagcaaattatgatgccagcaatgattctatttatggggtttgcggcgccatcaggacttgtgttgtactggataacaggtaacttatttacaatgacacaaacaattgtattaagaaaaataatggaacgtgaagagttacaattacaaaaagcatagagaaacaccgctcattacgagcggtgttttttatttgaatcgttaaggaaattttaagaaaccaatattactattggcgttgtatacgaaagtgtacatgctttagaaatatgaaggaggaaatttcctatgaagaagaaaacagttggttatttagcgattgcaggtgctttatcattcggaatcattggaggagtcggtgttccggcattcgcggcaacaaatactccaacagctgagcaagcgacaaaaacagtgaaaaaagatttagatgacgctacaaaacaaaaagtaaaaacgattatggacgatacaaagaaacagttacaggaactaggtgtaaagcttccggagaaagagaagcgtaaagacatgtttgcaggattagatgaacaggcgaaagaaaaagcgaagtcaattttagagcaagagaaatccggaaaactaacacgtgaacaagcaaaagaggaattaacaaagttaggcgtaaaaatgccggagaaaggtaagcgtggagacatgtttgctaacttagatgagcaggcgaaagagaaagcgaagtcgattttagagcaaaagaaatctggaaaattaacgcatgagcaagcaaaagaggaattaacaaagctaggcgtgaaaatgccggagaaaggtaaacatggagacatgtttgctaacttagatgaacaggcaaaagcaaaagcaaagtcaattttagagcaaaagaaatctggaaaattaacgcatgagcaagcaaaagaagaattaacaaaattaggtgtgaaacttccagagaaagagaagcatgaagacatctttgcaggattagatgaagcaacaaaaacaaaagcaaaagcgattttagacaatgaaaagaaacaattagaggcattgaatgttgatttaccgcaccataagttttttatgaaaaaagatgagaaataattgaatgaagtcgtatctttcgtgtgggggctttcttttgaaagacctccttttattgttggcgttttttgttggtaaatcgatatatttgaaaaatcgctgatataatttttacagctacactgctccaaagatacgagggaattagagaaatattacagcttctgttataatataagaagataaatatttcctatgttatataaaaaatatattgattttttctaacaattcaatataatgaacaataactacaaaattcgacatcaagaagtgatgatgaggacacgatcaattttttacgattctcagagagggaagcctttggctgtgagcttcctaatacggaaaaatagattaccacctctgaactgcagcagtgaacgagcatctagtaattgcttgccggcaaaaaccgttatttagacttgagaaattggtgaagtgtgttactttacgaattgaaacaagggtggaaccacgaatacaacactcgtcccttttttagggaggagtgtttttttatttcatttttgcatcacactaggattggaaggaggatacgcagcatgcatcatgatgagaagaacaaaattggtttaacagtagcactttctatcgtagtaggaacgattattggatctggtgtgtttatgaaaccagggagcgtattagattactcggggagttctaatatggccattcttgcttgggtaattggtggtctgttgacgctagcaagtggtttaacagtagctgaaattggagcgcaaatcccgaaaaatggtgggttgtatacgtatttagaggagatttacggaagtttttggggatatttatcaggttggatgcaaacaattgtttatggacctgctattatcggaacattaggtttatactttagttctttagtgattaattttttctatttagataaagtgtggaatttaccaatcgcaattggaacggttgtgttccttggcgttgtaaatagtatgggaacaaaatacggaggtatcgttcaaacaatcacgacaattgggaagatgattccgattgtgttaattgttgtgctaggtttctggaaagggaatagcgatatttttaacgtagttgtgccgatatcggaaaatcaaagtatcggtatggcaattttagcaacgttatttgcttatgacggctggattttacttgcttcgattggtggagaaatgaagaatccaacaaagttattaccgaaagcaatgacagtagggattttaatcgtaacggctgcttacgtattaattaacttggcattattaaatgtattaccagcagcgaaaattgtagaccttggagaaaatgcaacagcgacagctgcaggcatgttacttggagaatatggcggaaaaattattagtatcggtattatcgtttctattttcggctgtttaaatggaaagattttaacgttcccacgtatcccaatgtctatggcagagcgtggacaacttccattttctaagtttattgcaaaggaaagtccgagatttaaaacaccagcaaatgcgattactgttgaaatcattttaggaattattttaatgattattagtgatccaaataagctatctgagatttccgtattcattatttatattttctatgtaatgacgtttattggtgtcttcattttaagaaaacgtaataagaataaagagcgtgcatatagtgtaccgttattcccaatcgtaccaatcgtagcgattttaggttcgttttttgtaattggtagtgcgattattaacgatccagtaagttgtttcttatcgattggaattgtatttacgggacttccggtgtattggtatttaaataagaagaaagaaacagaatgatgaaaaggtaggcgtattatacgcctaccttttttactgtaaaaaaattgtacttgcttccattttctattttggttactatagtcgtagtaaccaaaatagaaagcgtggggaaagacttgaattttcgtgtttatattttagctatcgcggcttttgtagtcggaacggttgagctaattataggaggaacgctcgatttagttgccaatgatttaggagtatctattagcgcagctggtcagcttataacaatattttcggtagtatttgctttgtcaggtccagttttattagctttgacagggaagtttgaaagaaaaacattgtatgttggagcattatcgattttcttaatcggaaatattatttcggcatttagtgtgaattacggaatgctaatgttctcaagggttatttgtgcggcgagtggttcattaattattgcactatcggtaacacttgcttctagtgttgtagaaccgcattttcgtgcgcgtgcaattggaatcattttcatgggaattagcggatcactcgtacttggagtaccgctcggtcttgtgctcggaaatgcatacggatggcgtgcaccatttgtattaattgcggtattaacagttatggcaattgcttgtatttcattattcttaacgaaagtaccaccgacatcggtattatcaataaaagaacaacttgctactttaaaagataaaaaaattgtaagtgcacagttaacatcatttttgtttttaacagggcatttaacattgtatgcatatttaacaccgtttttaaaagatgtcatgtatgttgaagcaaactggattagtgtgttttactttattttcggaatcgcagcagtaattggtggcggattcggtggctggcttgctgataaatggggatcgaagaaaagtattatttccatcattatcgtatttgcgtgtgcaatcttcatactgccattaatgacattctcattcccactcttcatcattatgatgggactttggagtatgctgagctgggcgatttcaccagcgcaacaaaactatttaattgaaattgcaccagaatcagctggtattcagcaaagtttaaataactctgcccttcacttaggaattgcacttggttcaacagtaggcggagttgttatcgaaaaatcatctgttatatataatgcttgggtaggcggtggctttattgtattagcactgctttgcgcgattttctcgattacgagaggacgctctactcagttcgtgaaagaagaatctatcgtttgataggttctttttttatttgtaaaaaatcgcaggttttagtagaaaggtggagaatttgtatgtagcgaggtgatgtatatgtatacgaatttttcaattattggtcttctaatttcaatgctccctttgtttcttattattcttgcacttagatgggttcgtttcatctataaaaattcagagaaacaagtagagcaaaatgagaaaatcattgagctgttgatggagataaaggaacaaaacgaaaaggagtctaagtgaaaaactagactcctttttattatttaattagtatcttaatttcattaacaaactcttaatttcctcatcttccataaagaggtcatggtgtttctgggtaatctttgcaagtgcaacgtcatgatagaaaaattctgtaaagaactttacgaatggttgtgacattgttttcattgcttgccatgactcttgttctacgccagcaaataaaatttcacgatcgtcaacgatgagtagcaagtagcgctctaatgcattaggttcttcagctgggattagaaaatgcatgttttctaagtctgtttctacttctccaacaataagggattcaatttgaacaccttgttttgctttttgttctagtaaaggaagatattctaaaagagtatcattccaagctgaaatacggattgattcttttgcactttcaatgagttccttactttgaactcgaatagaagattgcatttttaagctccacacacggtcatctgtaaatgatttttttgatatatttgtttccagttctttaatatttgattggaattctgtcgttaatttttcaattgctagctttagtggtaatgctgtatacagttttttcttttctgaaacagaatccattaccattcctttatcgattaggcgtgctagcacttcatatatttttgcttttggaacacctgaatgcttcacaatcgttgtagcatctaatggttcattgcttgatacgacaacttcataagcttggctttcatattgtgagaaaccgaatttttgtaacatagttccctccgaacgaatgagattatattttaaggataatgaactatttgtttttgcacaagtggtagtccgttttctaattgtattaaggtgagaattaatttcaattttttaattttatctattatacttaatataatgattaataagattttaatttaatgcgaaggggatgctggggggaagatgttaagaagtttacgtttaaaaattgcggtagtgttttcagtacttatttctatgatgttcgtaatattgggtacagctgtgtatcaattacagaaagaaaaggaagtgcgttccttagacgagtattctcaaaatgcgatggatcttgtgacagagcaacttacgacatttgttcaaagaacggatgaagatatggggtattacgcgaacagtgagatgattcgtaatatacttcaaggtggggttactccagaagaggaagcgtttttaacgaaagagtttgcagagtataaaaagaatcatcctggtattttagatttatatattggtacgaaagataaaaaaacattaagtgccaatcttgctgaaggtgggcaagtgccagaaggatacgatccaacgacaagaccatggtataaagattcagaggctgatgtaaaaaaggtccactggggacaaccttcttatgaaattgcaacaggaaagttaagtgtaggtgtttctaaagcaattacagctcaagatggatctgtattaggcgttgttgcgatggatgtatcgcttgggacgattcagaagttgcttcacaatattcaatacaataatgacggagaaatgtttattataaatgataaaaatatggctcttgtttatccagaaaagatagggaaagatgtttctaaagagccgcttataaagagcttaaataaagaggtaacaaaatatgcggtcagtacaataaaaggtgaagatgtagttgtttacagtcaatcatttgatacgatgaaatggacgataggaatcttttatccgaaagaaacaatcgatgggctattaaatagtacgagaaatacagttattataatggcatgtattagtttattagttggaatcgtagcttcctacttgttctcaagaagattagcaagaccactgcaactattaaagaatcacgtgcaaaaagtagcagaaggcgatttaacgttgcgaatgaaagtgacaagtaaagatgaagttggagagttgactaagcactttaatgatatggttgaacaaatgaatgaaatggtaagtaaaattaaaaacagcgtatcaacggtgcaacaatcaacgaatagtttacattacttaacgaatgaaacagtagcggctagtagagaagtttcaggagcaatggatgatgtgagtggaggagcctctactcttgcgaatggtgtggatgaagtttcagctcagctcgagaatatggcggagtcagtggaacaaatgaatagctccgttggtgaaataaaaggagtagctggcaaagcggaagaggcatctaagcaaggattaaatacaatgaggaatttaatccgtacgaggggacaatcatcttcgattgttgttcatacagaagaagcatcggataagttagaacaaagagttggatcgattcaaaatgttgttgagcttataaaaggcatttcggatcaaacaaatttacttgctttaaatgcatcgattgaagctgcccgtgcaggtgagcaaggtaagggatttgcggttgttgctgaagaggttcggaaattagcggaacaatcaaaagaggcaaccggagaaatcacaacgatgattggtgatgtacaattagaagtaaaaagggttgtagaagttgtaagtaaattgaaagacattgcagatgtacaaaataaagtgacgacagaggcggaaatggagttccgcacaattatgtcagttgtaaatacgattagtacttcagttgaaaaaattgtagaagaggtacataacataggttacgagcaaggggaaattacagcggtaatgcatacaattgctggtacgagtcaagaaagtgcagctgtttctgaagaggtacatgctgcaacggaatcacaggtgaatcatttagaaaaggtagctcacacgatggaaagtttgacagaacatatgagagatttagaaagattagtcgagcagtttaaagtggaagagtaacatattagtaaaatgatgaggatttcggtaaaatagacaatggatatataagaaacgattataggaggaagactactatggcaattgttgatgtatcgattattccagtaggaacaggtaatccaagtgttagtgaatatgtagcagaagtacaaaaggtgctagagaaaaatgcggatcgcgtgaagtatcaattaacaccgatgaatacaattattgaaggagatcttcctgtcattctagaagtaattcaacaaatgcatgaagttccatatacgaaaggtgcacagcgtgttgcaacaactattcgtattgatgatcgtcgtgataaagtaagcacaatggagaaaaaattaaactctgttcgatcaaaattataaagaaaagcagcgattttcgctgcttttttcatatagggggtaaataaaatgagtgaaaagtttaacgagcagtttgatggtttactggagaaatacactgagctgttacttggagagagcaatgaagagagaaaagaacaggtacagaagtgggcactgtattcttacatagctaagacgatgccagctttagtaaagcattggaatgaaacttatccagatgcgaaagaagagatggtgcagttaattacagatattaaaaggctgaatgaagagaagcgaaatgagcaataaaaaaacttgagggaaatataatcgtaagttttctgtattaatatccttatataatttacatggaatataaagggttttataggcatgtcgaatattttcgacatgcctattttatgcctattaaactccatttttctaaatgtcgaaaaatatttcagttatatttataagcgaaaatatagggttttaaatgtttttatagtattttataaattatctaaataattatttgtatccaataattttaaacaatgatataattttgaagaggggtaaaaaacagataaattacagtcataggggtgaattacatggaacaattaatgcgaaattcgtttcttttcttgtcaaaaaataaagcgctaacaaaactggctaaaaagtacggtttacgctttggtgcaggtcgctttgtcgcaggggagacaattgaattagcgacagcagctattaaacaattgaacaagcaaggactttgtgtaacaatcgattatttaggggaattcgttgataatgaagcggaagcaaatgaaatggctaaccaatcgattgaagcgatccgtgcaattggaagagaaggtcttgattcgcagctttctttaaagatgacttctatgggattagatatctctgatgaaatcgtaatgaacaatatgcgccgtattttagaagcggcgaaagaaaatggtgtgttcgttaccattgatatggaagactatacacgctgtggtaaaacaattgatatctttaaacaattaaaatctgaatacgataatattggtactgttattcaagcttacctatatcgtacagaaaaagatattgaagatttaaatgcttataatccgaatttacgtcttgtaaaaggtgcttataaagaacctgaagaagtggcgttcccagacaagaaagatgtagatgacaattataaaaaaattattaaaatgcacttattaaatggaaattatactgcaattgcttcacatgacgaagcgattattgaatatacaaaaaaacttgctgaagaacacaacattccaagggatcaatttgaattccaaatgttatatggtattcgtaatgagcgtcaacttgagctagtaaaagaaggctacaaaatgcgtgtttacgtaccttatggaaacgactggtatggatatttcatgcgtcgtctagcagagcgtccagcaaacgttgcgttcgtattaaaaggtatggttaaaaaataaccaaggagaaaatactccttggttattttaattgctgaaatgcataatgtgccattttcttcgtatcaggatacagttgcttgcgggtagaagataatacaacattaatgacacgtttaccgtctttttcatccactgttacgactgtatatttgccaagtgctgatagaccgcttttacttccaatcgcatatggatcgtcatatagttcttctcgtccgtagtttgcgatgtttggagagcgttctgaagtatgtagagttgtacgcgttgaattcatatattctaaaacaactggatactttaatgcttctttcgtaataatagcaatgtcatatggcgatactttatttccaagtgcatcagcaccacttgcgtttttgaaagtcgcatgctttgtaccaagttccttcgctctagcattcatcatttttacaaattcattttttgatcctgcaatatgttctgcgatggattcagctattggatctgcactaatgataagcataagttttaatgcctcatcacgctttaatttttctccagcacgaagtttaattttcttgctttgactttctgttttaattgcgttttctgtaactgtaatttcttcatcttcttttacattctctagtaaaagaagggttgtcatcattttggctatactagccggataagagcgttcgtcttcacgtttcccatacaaaatttcacctgtgtctgcatcgattgtaactccgtattgcccagtaatgttgggttgatcagctcttacagcttgttgtctttgtgcataagagaagaaaatcatccctgtaaatagtgtagcaatcattacaatcataactattgttcgtttcattataattccctcatttgttacaaataaattgggcagaaaaagcagccattaatcattatgccacgttctctgcccaaaaatatagcgttatttttcgcccatattatgctttttatattgttggttattaccttgacgtcctttttccacgccgtggttatgcggacctgcatttccagttacactagctgcactaattccagcctttgaagggttcttcttaagttttgccatatatattcctccagtttcgtcagattataaaaagggaaagtgtattttagtgaagaaaatacatatatagcatggccaaatgaaagaaaaatatttatttcagaaaattttatcaataaatatattgcgaaaatttaaacagtatcatatatttattagtagaggctcactcattgattgcgacttatgtcgaaaaattgaatgagcattcattcaagaatagggggagaattggatgttccaaattaaaaaggctgctgttctaggttcaggcgtaatgggttcgggaattgcggcacacttagctaatattggtattccgacattattgcttgatattgtaccacctgcgcttacaaaagaagaagaagcgaagggacttacattagaacataaaagtgtgagaaatcgttttagtaatacggctgtgcaaaaactattaaagcaaaaaccagctcctctgacagtgaaaggaaatctagcactgattgaagcaggtaacttagaagatgatcttgagcgtctagctgatgtagattggattattgaagtagtagttgaaaacttagatattaaaaagaaattatttgaaaaagtagacgctgttcgtaaaccgggctcaattgtaagctcgaatacgtcaggcatttcagttgaaaaaatggcagaaggtcgttcagacgacttccagaaacacttcttaggcacacacttttttaacccaccacgatatttaaaacttctagaggtaataccgacgaaagaaacagatccacaagtattaagcttcatgaaactatttggcgaagacgttcttggaaaaggcgttgttatcgcaaaagatacaccaaactttattggaaaccgcatcggtacgtatggtttacttgttactcttcaagagatggtaaaacgcggctatagcattggggaagttgattctgtaacaggcccacttattggtcgtccgaagagcgcaacgttccgcacattagatgttgtcggtttagatacattcgtacacgttgcaaataacgtatatgaaaatgtgcaagaagaagagcgtgatgtatttaaagtaccagctttcatgcatgacatgcttgagaaaaaatggcttggaagtaaaacggggcaaggcttcttcttaaaacaaggaaaagaaattttagaattaaatcctgaaacgatggaatacgaagcgcgtaaaaaattaaaagctgcatccgtagagttaagtaaacaagaaaaaggattagcgaataaattgaaagcgcttgtatacgcgaaagaccgtgcaggagagttattatggaacatcattacaccaactcttttatactctgcaaaacttcataaagaaattgctgacgatatcgttgcaattgaccaagcgatgaagtggggcttcggctgggagcaagggccatttgaagtgtgggatgcaatcggcgttgaaaaatctgttcaaaagatggaagaaaacggcgtagttgttcctacttgggtgaaagaaatgttagagaaaggtttcactactttctataaacatgataacggcgatagctactattacgataatggcgaatataagctaatcgagcgtaataaaaaagcaatttctcttaagcaattaaaagcaaaaaatggtgtattaaagaaaaatagcggagcgagcttaattgatttaggcgacggcatcctttgcttagagttccattcgaagagcaatgcaatcggtatggatattacgcaaatgattaactacgctgttgatgaagtagaaaagaattataaaggtcttgttatcggtaaccaatcgaagaacttctgcgttggtgcgaacctagcaatgatcttaatggaagcacaagacgacaactactttgaaattgagtgggttgtgaaaaacttccaagatgcaatgacgaaaattaagtactcttctaagccagttgtagcagcaccatatggtatgacgcttggcggaggtacagaagtttgcttaccagcagcgagcattcaagcttctagtgaaacgtatatgggcttagtagaagttggtgttggcttaatccctggcggaggcggtaataaagagctatacattaaacacttaaacaaaatggcaaacggtgtagagtttgatctgcaaaaagttgcaaataaagtgttcgaaacagtcgcaatggcgaaagtttcaacttcaggacaagaagcagtttctcataacttcttaggtgataaagatggtattagtgtgaatggtgatcacttactatacgatgcgaaacagaaagcacttgctttatatgaagctggttataaagcgccgatccgtaaaaagataccagttgttggggaaacaggatatgcaactcttgcacttggtgcggaagcaatgcatttatctggttacatttcagagtacgatcttcacattgctaagaaacttgcatatgtcattgcgggcggaaaagtgccgtacggaacagaggttgatgagcaatatttattagatgtagaacgtgaagcatttattagcttagtaagtgagatgaaatcacaagcaagaatgcagcacatgcttgtaaaaggaaagccattacgtaactaataacgaggggagatatcgttcatgagagaagctgtcattgttgcgggagcaagaacaccaattggaaaagcaaagaggggttcattaaaaacagttcgtcctgacgatctaggggcgttagtagtaaaggaaacgttaaagcgtgcgaattatgaaggaccaatcgatgatttaattttcggttgtgcgatgccagaagcagagcaaggtttaaatatggctcgtaatatcggcggattagcaggactttcttacgatgttccagctattacgattaaccgttactgttcttcaggtttacaaagtatcgcttacggagctgagcgtattatgcttggtcactctgaagctgtattatcaggcggagcagaatcaatgagtttagttccaatgatgggacacgttgttcgtccgaatagtcgccttgtagaagcggctccagaatattatatgggtatgggacatacagcagagcaagttgctgtgaaatatggaatttctcgtgaagagcaagatgcatttgcagtaagaagtcatcaacgtgctgcgaaagcattagctgcaggaaactttgctgatgaaacagtacctgtagatgtgacgttacgctcggttggatcaaacaataaacttcaagaagaaacaatcactttcgcacaagacgaaggtgtaagagcagagacgacactagacattttaggaaaattacgtccagcatttaacgttcgcggttctgtaacggctggtaactcttcacaaatgagtgatggtgcagcatctgtattattaatggatcgcgaaaaagcagtgagcgatggcatgaagccacttgcgaaattccgttcatttgcagtagctggcgtaccaccagaagtaatgggaatcggcccaatcgctgcaattccaaaagcgttaaaactagctggcttagagttatctgatattggcttattcgaactaaatgaagcatttgcttctcaatccattcaagttattcgtgaacttggtttagatgaagaaaaagtaaacgtaaacggtggtgcaatcgcacttggacatccacttggctgtacaggagcaaaactaacactatctcttattcacgaaatgaaacgccgcaacgaacaatttggtatcgtaacaatgtgtatcggcggcggaatgggagcagcgggagtatttgaattactttaaaaagtgcaggtggctcgtttagaacaggagggcgttggaagccttgacgaagaggcgctttttgcctcacaggaaggggtgaaacgaccgactgttttagccactggaactggattatgaaaaaaagtggaagcggcttgttcagaatgtgagggggatggagcttcagacgtagaggcgctctttgcctcgtaggaagaagcgaagccaccgaacattctagccgctggaactggattataaaaaaaaatggaagcaacaaaggtttataaaaacaaaagggagagccagcttctttcaaaaagagagaagcggctcatgaaaatatgaaggaggaaattttcatggaaaaaacagtaggaaatgcggttaaaggcggtagctttttagtagatgagattacgattgatcaagtgtttacgccagaagatttttcatctgagcataaaatgattgctaaaacgacagaggactttatcgtaaatgaagttcttccagagcttgaatatttagagcaacatgagtttgatcgttcagttcgtcttttaaaagaagctggagaacttggtttattaggcgctgacgtaccagaagagtacggcggaattggtcttgataaagtaagctcagcgttaatcgcagagaaattctctcgcgctggtggttttgcaattactcacggtgctcacgtaggtatcggatctttaccaatcgtattattcggtaacgaagagcaaaagaaaaagtatttaccattacttgcaactggtgaaaaattagctgcatacgcattaacagagccaggttcaggatctgacgcattaggcgcaaaaacaactgcacgtttaaatgcagaaggtacacattatgtattaaacggtgaaaaacagtggattacaaactctgcattcgctgacgtattcgttgtatatgcaaaaatagatggcgagcacttctcagcatttatcgtagagaaagactacgctggcgtatctacaagcccagaagaaaagaaaatgggtattaaatgttcttcaactcgtacgttaattttagaagatgcgttagtaccgaaagaaaacttacttggcgaaatcggtaaaggtcatattatcgcattcaacattttaaatatcggtcgttataaattaggtgttggtacagttggatctgcgaaacgtgcagtagaaatttcagcacaatatgcaaaccaacgtcaacagttcaaacaaccaatcgctcgcttcccattaattcaagagaaacttgcgaatatggcagcaaaaacatatgcagctgaaagctctgtatatcgtacagtaggtttattcgaaagccgcatgagcacattatctgaagaagaagtaaaagatggtaaagcagtagcagcttctatcgctgaatatgcaatcgagtgctctttaaacaaagtatttggttctgaagtattagactatacagtagatgaaggtgttcaaattcacggtggttacggatttatggcagaatacgagattgaaagaatgtaccgtgattctcgtattaaccgtattttcgaaggaacgaacgaaattaaccgcctaattgtaccaggtacgttcttacgtaaagcgatgaaaggtgaattaccacttcttcaaaaagcacaaaaattacaagaagagttaatgatgatgatgccagaagaagtaggcgatgagccattagcacttcaaaagtatttagtaactaatgcgaagaaaatcggcttaatggtagctggattagcggctcaaaaatacggtaaagcattagataaagagcaagaaattcttgtgaatatcgctgacatcgtaagcaacctatacgcaatggagtcagctgttcttcgtacagaaaaagcaattaaaacaactggtcttgaaaagaataaacaaaaagtgttatacactgaagtattctgccaagaagcattcaacgaaatcgaagcagatgcgaaagaaacacttatcgcagttgaaaatggcgacatgctgcgcatgatgttatcatcattacgtaaattaactcgccacacaccacttaacgtaattccgaagaaacgtgaaatcgctgcgaaaattttagaagatgagcgttatacagtttaatatctttaaagaacagtagtcgtttatacggctactgttcttttttttgaaaaaaagaaattttttagtggtataaaactaatgctattagtataataaaactaatggcattagttttcgtgaaaagggagatgggactatgaggatgatacatgaaaaaacgttatatcaattgtcatttttgccaagagcgtttcctgtaaattgttactttgtagaggaagaagatggtttaactttaattgatgcggctttgccatatagcgcaaaaggtattttacaggcggctgagaaaataggaaaaccaattactaaaattgtattaacacatgcgcatgatgatcacatcggtgcattagatgcattaaaggaagtacttcctcatgttccagtctatatttctaagcgggacgcaaagctgttagaaggagatacgacgttacaaaaggatgaaccgaatataccgataaaaggcggtgtacctaaaaaagtaaaaacggtacctgatgttttattagaagatggcgaccgagttggatcgcttcttgcaattatgacaccgggacatacaccaggatccatgtcgtttcttgatgtacggaataaagctcttattgttggggatgcattccaaacaagaggaggtatggctgtttcgggacaaatgaaattttggtttccgtttcctgcgatggcaacgtggagcaaagaaatatcattacaaagtgcagagaagttaagcgaatatgagccttccttacttgcggcaggacatgggaaaatgataaagaatccagacactgtcataaaacttgctattaaggaagctaagcggaatatagaaagtaagaaagaggggtaatttatgtcaccgagaatcggacttacattacaaaaaattgtagaaacagcggcagaaattgcagatacaaatggaatacaagaagtaacgttagcttcattagcgcaaaggttagggatacgttcgccctcactatataatcatgtaaaagggttacaagatgtacggaaaaatcttggtatttacggaatcaaacagctgcataacagactagaagaagctactgagggtaaatatacggacgaagcaattcatgcattaggagaagcgtatgtagcatttgtccgaaaacatcctggactatatgaagcaacttttttacgagatgaagaagtaagaaaagcaggtgacggaattgtaaagctttgtcttcaagtattacaacagtatggcttagaaggagagaatgcacttcatgcgacacgcggattcagaagtatttgtcatggatttgcgtcgattgaacagcaagggggatttggtttgccgctagatttagatacgagtttacatgtattgttggaaacgtttattaaaggattacgtgaataagaagcaaagcaaacaaaaaccttagaagtgattctaaggtttttttgtgcatatgattcgaaaagaatggtaggctttttcttatgaaatgatattattttgcaggtttgaaaaatgtatatatcgctaagaaaaagcaaacgaaactgaatacgatggggtcttgatagggactaggctcagagcccttctggatttctgtaaggaagtcatgtgttttcatgtttattgctcctttatataagaatacttttaatgaagctaatacttactaatagagttgcactaataaacaataggaaaaatgtagtgttacgatttttataattgttaagtgctataaatagaaagcaaatgagaaataacatatgtaaagctatagaagtgaataacggctttaaatttaatatatcaatcaacagttttacatagaggattgcgtaaatgataaagaagataactttaacatatttttgcatgagcacaccttcctaccatggtttgtttgaggattatactgttattataaggttagcttttgaatatttgtatttttctgtaattataacatttttttgtatttataaatagatgtgattgatttgaaatgtaagaaagctttttcatgaatacgatttaaaaagaacagaatactaaaggagaatgaaagaagaaaggtaggagtattccatgcaaaatttaacagagcttgaagtagaaaacttacgtcatttaattggtggacacgcaacaattattaacaagttggagcagtatgcacagacgtgtacagatccacaattgaaacaaatgttacaaaaggatgcgcaagatgcacgaaatacgaaacagcaattaatgactttcctaggataggaggaagcggaacatgaatgaaaaagatatggtaaatgattatttagcaggattaaatgcaagtttaacaagttatgcaaattatattgctcagtctgataatgaacagttacaccaaacgttaattcaaattcgtaatcaagatgaaatgcgccaacgtaatatgtatgagtacgcaaagcaaaaaagttattacaaaccggcagcacctgcgaatccgatgattgtgcagcaattaaaaagtcaattaagtgcggaataacaggaaaaagaagacgagcgaatttattcgctcgtcttcttttttatatgtcaataaatacataataaatatttttccagctgtaacaaatatgacgaaaatggaatataacaattcacaaaaaggacaaacgatttgctcaatatttcacaaagtatccatgatttctatcgtgagaacctttataattaggagtgtaaagagcaaaagaaatagattatatgatcaattaggagagattgctatgaaaagacatacaagaaaaattgcaattatcggtactggattagttggatcaagttgtgcgtattccattgtaaatcaagggatttgtgaagagctattattaattgatataaatcatgaacgtgcagttggggaagcaatggatttatcacattgcattaactttacaaatacaagaacaaaagtatatgcaggaagctatgaagactgcaaagatatggacattgttattattacagcagggccagcaccaaaaccagggcaaagtcgcttagatactttaggagcgagtgcgaagattatggaaagtgttgttggcggcgtaatggaaagtggatttgatggtattttcttacttgcatcgaacccagttgatattattacatatgaagtgtggaaattatctggattacctagaaatcgcgtaatcggtactggtacatcactagattcttctcgcttaagaacaattttatctgaaatgctacatgtagaccctcgtagtattcatgggtattcattaggagaacatggtgattctcaaatggttgcttggtctcatgtaactgttggtggaaagccaattctgcaaattttagaagaacaaaaagaacgatttggtgaaatagatttagatgaaattgttgagaagactgcaaaagctggttgggaaatttataaacgtaaaggaactacttattacggaattggaaattctctagcatatattgcgagttcaatctttaatgatgatcaccgtgtcattgctgtatcagccattttagatggtgagtatggtgaatatgatatttgtacaggagtaccagctattattactagagacggtataagagaagttgtagaactcaatttaacagaggatgaagaatctcgattcgcaaaatcaaacgatattttacgtgattatatgaaaacaattggttactaacttatagaagaaggtgaaacaaatgaaggaatatataatgtctcgtgtatttaaagcatctgctggaatcgcacaaggtattttcgtatccctcggaattggtttactgatcgaaaatataggaagaattgttgatataccattacttattacaatcggagttgttgcaaaatcactaatggcaccggcaattggtgccggaattgcttttatgctcggtgcaaacggtcttgtaatcttctcagcgatggtagccggagcaattggtgccggatccatttcaattactgaagctggtctaattattaaaacaggtgagccaatcggtgcattattaacagcaactttagctgtatatattggtaaacgtttaagtggaaaaactgcgttagatatgatgctcgttccatttgcggccatattaggttctggtttagttggtatttggttatctcataatattactcctgttttaaatacagttggaacgtttattaaagatagctcagctggtagcccattcatcgcttctatcgtcattgcagtcgtttggggactattacttatctctccagcttcatcagctgcgttagcaattgcacttagcttagacggtgttgcaggtggtgctgctcttgccggatgcgtcgctcagtttatcggattctctgtcatctcagcgaaagaaaataatttaggtggcatattagctcaagcactttgtactccgaaagtacagttaccaaatatcactaaaaatccaatgattctcgtcccaactgtcgttgccagtgctatagtcggtccagtatccgcattaattttccaactggaagcaggaaaggaaattgcaggtcttggattaagttctcttatcgcaccaattaatttaatttccagccaaggatgggaagttctcccggcgatggtaattacttatatcgtcattccagtagctgtttcttatatactttacattgctcttaaaaaagcaggtcgtattcactctggtgatatgactgtaccgcaatcttaagttgaaaatctccttactaatagataaaagcagactgagaagccacagtctgcttttttgtcatgctacattctatgattttgttttactggaactcttatcggttctttggccaataagagctgaacgccgaagtaaagtatgcttgcaagcgtcattccagaaacggcatctacaaaggcatgctgcttcgtaaatagcgttgataaaataataagtgtaccgaagaaagtaaggatgtaatattcaaaagcatgctgttctctacgcttaaaggcagctaacataattacgaatgtagtaagaacgtgaatgctagggaaacagtttacaggttgatcgatactataaatatagcgaactagttcagaaaatacatctgttccaacgacagtcggacgcggtacagttgtttgccaaaaataataaatagaaaaacaagcaagctttccaaaaataacactacttaaagtgacataatattgctttcggtcagcaaagcagtaataaataagtgcgccgtataagtatggaaaccaaagtaaataaggaataataaatgcttttacaaatggaatccaatcatctactacagttgtaacgtctactgcgtgaacagtcgatttatttaatacgtcgtaaaggggacttacgagcacgagtagaagtatataacttaacggaagaaaagatgaaagtttaaatttcttcatgttgatctcctatgtttagtaatgtaagtaaattcaattgattataatatagaaacgtgaattgggctatcgattttacttacattttcttgaattaaccttacgtttttgtcacttgactaaaaagaaggagagggtgctaaatgaagcgtttatcgtatttcttattttttatattgatatgcctagtaggtgctgggtgtgcaaaggataaagcaggagagaaattagaatataacggaagagcactcgtaattggagttgttggagaaaagccgaaagatacgtttaggaatgtaaagtttgaagaaatgaagttagaggaactggaaaagaaatctaaggaagtggatggttttctaataatgaaagatcactttcaagaagcctcaacagagcagtataaaaatgtattttcatcgctaaagaaaccagtgttttttatcggtttacaagataaatcatattcaatttttattacaaaaggaatagagtataacagtgcacgaaaagatgtaaatgctatgtatacgcaaggctttgcaaatatcggaagtggtgaagggcaacaatgggcaattggtttatctaatggtggaaatacagaagaaagtattcataatatgtatatcgtcgtatttcaaaccatcgcagattatttgaatagatgatgagggagcctgtaaacgaggcttcttattttttaatcaaacgtttgtttaagctgtatgttcggtaggaagaaactgatgtaactcaatggttaacaaagagaaatggagaattaatcaaacgtttgtttaagctgtatgttcggtaggaagaaactgatgtaactcaatggttaacaaagagaaatggagaattaatcaaacgtttgtttaagctgtatgttcggtaggaagaaactgatgtaactcaatggttaacaaagagaaatggagaattaatcaaacgtttgtttaagctgtatgttcggtaggaagaaactcctgtagttcaaaggttaagaaagaaaaatggagaattaatcaaacgcttgtttaagatatatgtttggtgcagaatctaaaaaatttatatatttatttttttcttaacaaatggcggaaaaataagaaaaattcgcaggattattaaaaattatcacgaaataagtaaaagtttagcgaataatggtttgaaataacaaaacgttttctatatgataaaggtaaaggttagtaaaaaagtaggtgaatttatgacagtaacattttattcatatccaaagtgtggcacatgtcaaaaggcaaagaaatggtttgaggcaaacgatgtagcatatgagatgattcatattgttgaaaatccaccatcaaaagaagatttacgtaatttacatgaaaaaagtgaattaccattaaaaaaattctttaatacaagtggaatgcgttaccgtgaacttggtctaaaagataagttgaaagatgcaagcgaagacgaaatgtatgagcttttagcatctgatggcatgttgattaaacgtccaattgtaacagatggaacgaatgtaacacttggttttaacgaagagcagtttgaaagtgtgtggaaaaagtaccaataaggtatttttacataattaatacattcactggaggtacagtcatgagcattccaaataatttacgttactctgaagaacacgaatgggtaaaaactgaaggtaatgaagttgttatcggtatcactcactttgcacaaggtgagctaggcgatatcgtattcgttgaacttcctgaagtaggtgcaacaatcgaagctgacgagccattcggaagcgtagaatctgttaaaacagtttctgagttatacgcacctgtaagcggtaaagttgtagcagtaaacgaagaattaagtgaccaaccagaacttgttaacgaatctccatacgagggtgcatggatggttaaagttgaactttctgatgcaagccaagttgagaagttattaactgcagaaaaatatgcagaaatgacaaaccaagactaattgtagtcgactaaaggacagcctttgtgctgtccttttttattttgtgtgaaataatgaaattcaagttatatgtaaataaataagctattatgagaaaaactgttttgtggtaaggtttcataagtcttcacaatctaaacgagccgcttgcgcttttcattgtccagctccacctcctagcccttcatgtctaagaaccttccgtacgagaagacaaaaagcgtcttctgtacgaaagaaccttagccaacagggctaaacagtcggttccgcttttcgttgtctagctccagcggctagaacagtcggtcatttcactccttcacttgaggcaaaaggcgcctctagttcaggagttccaatgccctcctgttctaaacgagccgcttccgcttttcttttgcaaaaataaacaggaaacaacatgaaaataacgaatatactatatactaagttcaaggttatatagtatatggtgatcgggtgatgacatatgatttatgtagaaaaagtcattattgtagaaggtacatcagatagaagaaagattgaatctattattcgtgaaccggtggaaattgtttgtacaaatggtacaattggtttgtcgaaaatggatgagctcgttgatcagttttttgataaggaagtgtatgtgctagtggatgctgatgatgctggagaaaagttaaggaaacaatttcgaaaagaatttccgcaagccgagcatatctatattgatcgctcgtaccgagaagtggcaactgcgccatctacacacttagcaaatgtattatggggagccgacattgacgtttatacagaatatttacggtaaggaatgatagaagtgattgattggacaggagccgaagctacagccctaatagagaacgaagaaaaaacagtattatatgtatatactccaatgtgtggaacatgccaattagcaaaaaagatgttaacagttgttgagatgacaattgaaggcctcaaaattgggatgttagatttaaattatgctccgtatttagcgaaagagtatgggattgaaagtgtaccttgtttacttgtttttgaaaatgggacactgatgaagaagatatacgcatttcattcggttgaatatttatatacggaattaaagtaggcggcaaaatttttgccgcctcgacatatttcttgggaaatatgtcgagatgcagggtggatacagtatttgtcgagcgaaaataacaggattgctctttagtgagagggaatggtatgtaatagaaagtgatatgaaggatgtgatttagggtgagattatattctttgcttcaatcatttgtaaattacgctaatggtcaatatcatttagaaccgcttttaagacaagaagaaaaaactgttaattttcgctttggagatgaaagttgttcgttacaaatttcaagagattatatagagctggtacatgaggaaagaggaacggaacaaatcatttgcttagatgaaaaggatatagaacaattggtgaatggaaatgtacgattgcaaatgttaatgaacgatggacgtgtacaatattcaggaacgtaccgaacgatgttattagtggaatcgatgtttcatatatgtaaaccgatgtcagtaggtgcttaaaattctgaagtttcattttttgcgaaaatttctgttgacatggtgagtgtatattgatacaattcaagtcataaaatatagacaatttcataaatttcaaatcagacgaaaattgaatctgatttctcttatcaagagaggtggagggactgtgccctgtgaagcccggcaaccgtcaacttatgttgaaatggtgccaattcctgcaaagcgaatgctttgagagatgagagagagggataatgttgttatatacgcatataaacctttctgcttctctaaagcagaaaggtttttttattgtttgaatgtggaggacattcaaataataaaagtaatgataacattggactacacgcattaaaaataaaaaattgcggagtcgatccaaacaaaaaaggggtgaacatcatgattctattagagaacgtaaagaaaatatataaggcgaaaagcggtgatgtcactgctgtagataacgccaatttaaaaatagaaaaaggcgaaatatttggtgttattggatatagcggcgctggaaaaagttcgttaatcagattgtttaatcagttagagaaaccgacttctggccaaattacaattgcgaatcgtgttatatcagcaattacaggaagtgaacttcgtaaggcaagacaagaaatcggaatgatttttcaacacttcaacttactttggtcacgaactgtacgtgaaaatattgagtttccacttgaaattgcaggtgttgataaagcgaagagaagaaaacgtgttgatgaattaattcatcttgttggattagaaggaagaggagacgcgtacccatctcagctgagtggaggacaaaagcaacgcgtcgggattgcaagagcattagctaacaatccacaagtgcttttatgtgatgaagcaacgtcagctcttgatccggaaacgacagatcaaattttagatttactattagacattaataagcgtcttggtttaacaattgtactcattacacatgaaatgcacgtgattcgaaagatttgtaaccgagtggcggtaatggagagaggaaagattgtagaaacaggtccagtacttgatgtattccgtaatccgaagcaagatattacgaaacgatttgtacagcagttaacagattctgaagatacaaatgaaacaattgaaaatttaattgaaaaatatccagatggaaaagtaattcgtttgcagtttatcggtgaggctgtagaaagaccagtgcttcaacgattaatgcaacgcagtgatatagaagttagcattttgcaaggaaatattgcacaaacgaataacggttcttacggtagtttagttgttcatttaaatggtgaggaaacagcgatccagcaagcaatagaaggaattcatcaagatcaagtagagctggaggtgattgcacatggataagttactcgcaaatgttgattggaatcaaatgttagaagcaactggtgaaacgttatatatgacggcaatcgcagcccttgcgacatttgttttaggactaattttaggattgttactcttcatgacagcaaaagataatttatgggaaaacaaatcaattaatacggtgattggagcattcgtaaatatattccgctctataccgttcatcattttaattattttattaatcccatttacaaagattcttcttggaacaattcttggagcaagtgcagctctgccggctttaattattggagccgcaccattctacgcgagaatggtcgaaattgcacttcgcgaaattgataaaggtgtaattgaagcttcaaaagcaatgggagcaaaaacaagcacaattattttgaaagtgttaattccagaatcattaccagcattagtatctggtattacggttacgacaattgctttagtaggctatacagcaatggcgggagttgttggtgctggtggccttggaacacttgcttacttagaaggattccagagagggaataacgatgtaacaatcgttgcgacaatttgtgtattactagttgtatttttaatccagtggattggtgatagtttaacgactcgaatagataaacgataataaaaacgggaggatattttaaatgaaaaaattattacttacggcacttatttcaacttcaatttttgggttagctgcttgtggcgggaaagataaagatgaaaagaaacttgttgttggtgcttctaacgtaccgcatgctgaaattttagaaaaagcaaaaccgttacttgagaaaaaaggaattgaattagaagtgaaaaaattccaagattacgtgttgccaaataaatcgttagcggataaggaattagatgcaaactatttccagcacattccatatttagaaaaagaaattaaagataaaaaatatgattttgaaatagcagggaaaattcatattgaaccaattggtgtatattctcaaaaatataagagtttaaaagaacttccagacggggcgacaattattatgagtaattccgttactgaccatggacgtggtttagcaattttacaaaaagaaggcattttaaaaattaaagacggagtagatccagttagtgcaactccaaaagatattgcagataatccgaaacacttaaaattcaaaacggatattgagcctggtttgttgccacaagtgtataacaataaagaaggcgacgctgttttaattaactcgaactatgcaattgatgcgaaattaaacccagaaaaagatgcaattgcaattgaaggcgatgattctccatacgcaaacgtactagtggttcgtaaaggtgataaagataaaaaagcgattaaagagcttgtagaagtattacattctaaagaaattgaagactttattactaaagaatataaaggtgcagttgttcctgtaaaagaataattgctgaaaaagggctggtgtatgccggtccttttttactacataactatagggagaaggggacgtcatatgaaaaagattctattgtcagttgttacagcattatctgtatttacattagctgcttgcggagggaaggaagagaataagcttgttgtgggagcttctaacgtgccgcacgctgttattttagaaaaggcacagccgatattagagaaaaaaggcattaagttagagattaaaaagtttcaggattatgtactgccaaataaagcgttagcggataaagaaattgatgcgaactacttccagcatattccgtacttagataaagaaattcaagaaaagggatataaaattgtaaacgcaggaaaaatccatttagagccgatgggtatttattctaagaagtataaaagcttaaaagacttaccagatggcgggacagtgattatgagtaataacgtagcggagcgtggccgtatgctagcactgttacaaaaaggcggcgttattaaattaaaagacggagtagatgttgttaaggcaacagtaaaagatgtagtcgaaaatccgaaaaacttaaagtttaaaacagatgtagagcctggattgtcaccaaagctgtatgaaaataatgaaggtgatgctttatttattaattcaaactatgcaattgatgcaaaattaaatccaacaaaggatgcaattgcgattgaaggagcggactctccgtatgcaaacatcattgcagttcgtaaaggtgatgagaagaaaaaagaaattaaagagctagtagaagtgctacattcaaaagaaattcaagattttattaataaagaatataaaggtgctgtacttccggtaagtgaataaatataaggaaagggctggaaaattaccagtccttttttctttatataaataagaagaaaggtgtatcatagaaagatgtgaaggaaatacttatatacatttgtgaaaaaacggttactttttttcgtcgtttgcgatatcattttatttgatataaaattagaatgagaataaaatgagaatatgaacgttttaggaatttttaaaatgtatatataggattaatggaggtattgagatggctggttctacattaacggttaaagacttacacgtatcaattgatggcaaagaaattttaaagggtgtaaaccttgaagtaaaaggtggagaaatccacgcaattatgggacctaacggaacaggtaaatcaactttatcttctgcaattatgggtcacccaaagtatgaagtaacagaaggtagcatcatcatcgacggtgaagatgtattagaaatggaagtagacgagcgcgcacaagcaggtctattcctagcaatgcaatatccaagtgaaattagcggagtaacaaacgctgacttcttacgttctgcaattaacgcacgtcgtgaagaaggcgatgaaatttctcttatgaaatttatccgtacattagataaaaacatggaattcctagaaatggatccagaaatggcacaacgttacttaaacgaaggtttctctggtggagagaaaaaacgtaatgaaatccttcaattaatgatgattgagccaaaaatcgcaatcttagatgaaatcgactcaggtcttgatatcgatgcattaaaagttgtatctaaaggtattaacgaaatgcgcggcgaagagttcggttgcctaatgattacgcattatcaacgtttattaaactacatcactccagacttcgttcacgttatgatgaacggtcgtatcgttaaatctggtggccctgagcttgcacaacgtctagaagctgaaggttacgactggattaaaaaagaattaggtattgaagacgaaacaacagagcaagaagcgtaagagaggagcataaacatgacaatcggtacattacctttcgatcaagaaacaatccgtcaacgcgcaagcgaagtaaacgaagctgcttggttgactgagttccgcttacaagctcttgcacaagcaactgaacttccaatgccaacgcctgataaaacgaaaattgacaaatgggactttatcggaaaaggcgacgctgctaagcaagagcctgtaagttctttaactgaacttccagaagcagtgaaaaacttaatcgatgaaaataacagcgtattagtacaacgcactggtacaactgcattcgtttctttagcagacgaagcaaaagaaaaaggtgttatttttacagacatcgtaacagcagcaactgagcatgctgaactagtacaaaagtacttaatgaaagacggcgtgaaagtagacgagcatcgtctaactgcacttcatgctgcattaatcaacggtggtgcattcgtatatgttccgaaaaacgttgttcttgaaactccacttcaagctgtattcttagtagacggcgaagaagctaacgtatataaccacgtactattcgtagctgatgcgaacagtactgcaacttatgtagaaaactatgttgcaaatgaaaatgctaaaggtattgcaaatatcgtagcagaagtaatcgtggaacaaggcgcacaagtgaaattcggtgcagttgatctattagcaaaagacgtaacaacttacgttaaccgccgcggcgttgtaggacgcgacggccgtattgattgggctctaggccttatgaatgacggaaacacaatttcagagaacgttacgaacttaatgggcgacggttcatatgctgatacgaaaacagtaacaattggccgtggcaaccaaacacaaaactttacaactaaagttgttcacttcggtaaacattctgaaggttggattttaaaacacggtgtacaaaaagatagtgcaacatctatctttaacggaattggtaagattgaacacggtgcatctaaatcaaatgcacaacaatcttctcgcgttcttatgttagatgaaaaagctcgcggtgatgcaaacccaattcttttaatcgacgaagatgatgtaatggcaggtcacgcagcttcagtaggtcgcgtagatccagtccaactatactacttgatgagccgtggtattccaaaacgcgaagcagaacgtttagtcatccatggattcttagcacctgtagttaatgagcttccaattgaaggagtaaaggcacagcttgttgaggtaattgaaaggaaagttcgctaatgaatattcatgaaatacgcaaacagtttccaattcttgatcaaaaagtgaacggcaaacaacttgtttatttcgatagtgcagcaacttctcaaaaaccaattcaagtcattgaaacgttagaacgttactataaagaatataattctaacgtgcatcgcggtgttcatacgctcggtacgaaagctaccgacgcgtatgaaggtgcacgtgagaaagttcgcaagtttatcaatgcgaaatcaatggaagagattattttcacgcgcggaacgacaactgcattaaatacagtagcggctagctatggtcttgaaaatgtaaaagagggcgatgaaatcgttatttcttacatggagcaccatagtaatatcattccgtggcaacaagttgcgaagaaaactggtgcaactttaaaatatcttccgcttcaaccagatgggacaatttcaatagaagatgctcgtcaaacaattacaccgaatacaaaaatcgtttctatcatgtatgtttctaacgtacttggaacgattaaccctgtaaaagaaatcggagcaattgcacacgaaaatggcgcaattatggtcgttgacggtgcacaaagtacacctcacatgaaagtagatgtacaagatttaaactgtgatttctacgcattatctgctcataagatgtgtggccctacaggtatcggcgtattatatggtaaaaaagaattgctaaacaatatggagccaattgaatttggtggtgaaatgattgatttcgtagatttacaagaatctacttggaaagagcttccgtggaagtttgaagcaggtacaccgattatcggtaatgcaatcggacttggtgcggcaattgatttcctagaagaaatcggtcttgataatattgaaaagcatgagcatgaattagcgcaatacgctttagaaagactatcagaagtagatggcgttacaatttatggtccaaagcatcgcgctggtcttgttacatttaatattgaagacgtacatcctcacgatgtagcgactgtattagatgtagaaggcattgcagttcgcgcaggacatcactgtgcacaaccgcttatgaagtggctaaaagcttcttcaacagcacgtgcgagcttctatttatataatacaaaagaagaaattgatacatttgttgactcgctaatcaagacaaaggagtatttcacaaatgtcatttaataatttagatacgttatatcgtcaagttattatggatcattataaaaatcctcgtaaccatggcgtattagaagatagtgttaccgttaacttgaacaatccaacttgcggcgatcgtattcaacttacgatgaaagtagaagaaggtattgtgcaagaggcgaagtttgaaggcgaaggatgttcaatctcaatgtcttcagcttcaatgatgacacaagcagtaaaaggtaagaaaattgaagaagcacttcagctttcgaaaattttctctgacatgatgctaggaaaagagtacgatgacagcatcgatttaggagatattgaagcattacaaggcgtatgcaagttccctgcacgtattaaatgtgcaacattagcgtggaaagcgttagaaaagggcttaaacgaagataagtaatgttaaaggttcctaaaaacgaggttatctaaggagggacacaccaacatggcgaagcaactgccagatatcggcgattataaatatggtttcaaagacaaagacgtttcgattttccgtgctggacgcggtttaacaaaagaaatcgttgaagaaatttcacgtatgaaagaagaaccacagtggatgttagacttccgtttaaaatcactggataagttctacgaaatgccaatgccacaatggggcggcgacttaaacgacttagatttcgatgaaattacgtactacgtaaaaccatctgagaaatctgagaagtcttgggatgaagtacctgatgaaattaaagcaacatttgataaattaggtattccagaagctgagcaaaaatatttagctggtgtatctgcacagtacgaatctgaagttgtataccacaacatgaaagaagacctagaagctctaggaatcgtcttcaaagatacagatagcgcattaaaagagaacgaagatattttccgtgaacatttcggaaaagtaatcccaccaacagacaacaaattctctgcattaaactctgcagtttggtctggtggatcattcatctacgttccaaaaggtgttaaagttgatacaccacttcaagcgtatttccgtattaactctgaaaatatgggacaattcgaacgtacgcttatcattgtagacgaaggcgcacacgtacactacgtagaaggttgtacagcacctgtttacactactaactcacttcacagtgcggtagtagaaatcatcattaaaaaagatgcttattgccgttatacaacaatccaaaactgggcgaacaacgtatacaacctagttacaaaacgtgcggtttgtgaagaaaacgcaacgatggaatggattgacggtaacatcggatctaaattaacgatgaaatacccagcagttatcttaaaaggcgaaggcgctcgtggtttaacattatctatcgcgattgctggtaaaggccaacaccaagatgctggtgcgaaaatgattcacttagcaccaaacacgtcttcaacaatcgtttctaaatcgattgcgaagcatggtggtaaagtaacttaccgtggtatcgtacacttcggaccaaaagcgaaaaactctcgctctaacatcgagtgtgacacgttaatcatggataaccaatctacatctgatacaattccttacaacgaaatcaaaaacgattacgtttcacttgagcacgaagcgaaagtatctaaagtatcagaagaacaattattctacctaatgagccgtggtatttctgagcaagaagctacagaaatgatcgtaatgggcttcattgaaccattcactcgcgaacttccaatggaatacgcagttgaaatgaaccgcctaatcaagtttgagatggaaggttctattggttaaatagaaatgcggagccgactgttcagacccgttggctaaggttctttcgcacagaagatgctttttatcttctcgtgcggaaggttcttagacatgagggtctaggaggcaaagctggataatatatgtatgaagaaagcgccctgctgtgcagggcgcttttttgttttgcggatttgtcttggcttgggagaggatacccgggtgggtgttcagttaaatatatcagcgatttttcaaatatatcgtccataactcgaaatatatcagcgattatttcaatatatcgacgattcgacaagggatatcgacttatcaacaaattacgacatagcaagaggaacgaataccccgtacccttcaaaaaggaaaggagcatttatacataaagagggcaactgaaagtaatttagattaaaatactgacaaatgcagcaaagaacttatgggaaaatccccacggctaactttctgacaaatccccgctctaccaacaaatccccacactggcaaaaataaagtttctcatataaaaaggacaatcttttgctttttctcacaatgcgagtacaatgtaaaatagcaagaaaagacgaaaagtatttacaggattattgtgtgcgcatagcgtaaatggcagtaaggaactgagaggaggttttttctctgaatacaaataaagaaacaatcatccacctttatcatacaaacgatatacatagtcattttgaaaattggccgcaaatttctcggtttgttctaggggagaaaaagcgaagacaggaagcgggagagactgttttgacggttgatatcggcgatcatgtggatcgttttcatagtatttcggaagcgacgaatggacttgggaatacgaagcttttgaatgaggcgttatatgattatgtaacgatcggaaataatgaaggaattacgttagcgaaggagcatttgaatcggctctatgatgatgctggatttgaaatacttgtcgcaaatttatttgaaaaagaaggggtacgtccgtcatgggcaaggccttataaattgcatacaacgacggatgggattaccattgcttttatcggattaacggtagcttatccagagttttatcagatgctcgattggcatattgaagatcccattattcatttagagtctattttagaagaagtgaaagatgaggctcatattacggttgtcctttctcaccttggaaaaagtatggatgagtatatggcagagcattatgatatagatgttattttaggagcacatacgcatcatttatttgagcgtggtattctactgaataatactttactttgttgttgtgaaaagtgggggcgttacgttggtcacgtgcagcttactgtggatatagagatgaagaaattgctgaaaaaagacggtagggcgattaagacggaacggttaggtgcttatagcgagccgttatccacaattgaaatactgcaggaagaaagtgagcatataatggcagagtctgtcgttcatttaaaagagtcattaccggttgattggtttcatgagacgccgttttctcacatgttagcaagtgcgctgaaaacatggtgcaatgcagagattggcatggtgaacgctggtgtacttcttgaagggttagaagagggtgttgtaacgcgcggagatattcacagaatttgtccacatccaattaatccgtgtgctttgaaagttccaggaaagatattaagagaagttattttgaaagcacgtaagccgaatatggagaatcttgaggtgaaaggattcggatttcggggaaaagtgatggggaaaatgatttacgctggtgtagaagtcattccagatacgattcccgggaataaaattttactcgaagatgtattaattaacggggaatcgctggaattagatcgtatatatacagtaggaacgattgatatgtttacatttggctacttatacccagagctatccacactttctgacaaacaatattatatgccagaactacttagagatgtgttaacagatatgttaataacttatacatcttccgttaaactataggctagttaacttgtaacactcatttttctcttgtcatacagataagaaagagaggagtgtgaactatggttaatgtggagccaattataattgataattatacgtttattgcagttagcgtgaaacttccaaagacgaatttgctagctgtaatgagcgataaaggatatattatgtgtggtgcattagatgtaggtcttttaaatgagaaattaggtgatcgaggaattattgctggccgtgcggttggtgtaagaacgattgaacaacttcttgaagcgccactagaatcggtaacgactggagctgaagcattaggcattccagcaggtacgattggaaaagaagcattattaaaaatgagataagcatatatcgtccctccttcttgcatagaaatgatataagaaggaggtttttttatgagtatatttcgctcgaaaaactcgcggtttcgaaggggacctattgcctttcggtatatactgcttatgtcgtttattctttttgttatattacttacgcaagggttgtggattgtgaataataatattcagccgaccttaattaaatatggggaagtagagacacataaaatggcgacggcaattatgacgaaggcagtaaaggatcgaattaatgaaggattcgatgtagattcattaatgaaagtacagaatgataaaaacggaaaagtatccacaattaatttaaatacaaagcaagtaaatgaaatcgtaacatcaacgaccacatacatagaaaaatatttgcagcaagtagaacaagggaagttgaaggagctaggtattgctgaaaaaaacggcgcgactatggcagttccttttgggcgtgtaactgataatgcacttcttggtaatataggaccagatattccgattcatttcacgccagttggacatgtgaatacagatattaaacaaaaaattgagccgcatgggattaatactacagcgattcaaattgttatggaaatggaagtaacattgcaagtgattattccatttcatacgaaagagataaaggtgaaacaaaatgttccgattgcgacgcgtatcgttcaaggggaagtgcctacgtattatggaagcggaagtgttgctgtacctgataaaaagaaaacagatagttagttgtaaataaagtgaaactcggctcagtcaggcttttactggataaaaaataaccgtagcaatgcagctacggttatcgttttgtatttgctcgttctttgcgctcccaaaggcttaaatgcatgtatggatcgaaggcccattctgtatagccattgtctttatacatgccaaaatgtaagtggggcggaaattttccggctgtaccaggaggtccataaccagtgctaccaacaaatccgattactttccctggctcaacaatttgtccaagctgtatttcttttgaaaacccgcctaaatgagcgtaataatggtaattgttatgaaggtcgcgaataccaatgcgccatccaccaaggcggttccaacctttcgtttcaataatgccatagcaagtcgatcttactggcacgccatatccggcaaaaatatcggttccttcatgaatccttctgccgccaaaacttcttccagcgccgaaagtactacggtagctatggtcactacggatcggaagaggaaaagcatttccttctaaattaatacgtccataatgtttataaatttgggcgtattcgctaattaaatcaactgttttggcacgtctataatattcccagagcataattttaatacggtcttctgatgttccttgtttccttaaaatagtcgctgcggtatgcagaagatcacggtcgctatttgcatttgcaaatccatctttgtcaccatctaaacctattccgccaaatagagaaattgtatggggaagagtatcgttactattaataggtccagcccatatttctggtttgaaataaagggaaatgatggcatctggttttttcggaatatcttttcttacgctccgtatatttctttcatattgatccattgcagctaagtaataccatggaatgcctgaagactgctcggtttctttatatagtgccatgcgcttttcgtatatgctttgctgattatcttcaccgtaagcgatgttttggtggagaagaaaacaaatagaaagcaaaagagaaatttttcgaagcatgaaatagactcctttcacaacatcactctttttagtgtgggatatacggagtatttcattatagggaacgattggaaaaaatcttagaatcttcatttgagcaaatcgctttcatacgttagaatagatatgttacattgaaagaagcgaacacggtaaactatttcatattgtgcggagttgataaccatgacaaaacaaacagaatataagcgcaagcccgaatggttgaaaattaagttaaacacgaatgaaaactatacaggcttaaagaaaatgatgcgttctaaaaatcttcatacagtttgtgaggaagcaaaatgtccgaatattcatgaatgctgggctgtaagaaaaacagcaacatttatgattttaggtgcggtttgtacacgtgcttgtcgtttttgtgcggttaaaacaggcttaccaactgagcttgatttacaagaaccagaacgcgtggcagattcagtagtacaaatgggcttaaagcacgttgttataacagcggttgcacgtgatgatttaaaggacgggggagcagctgtttttgctgaaacagtacgagcagtacgtcgtaaaaacccattcacgtctatcgaagtattaccatctgatatgggtggagtagaagaaaacttaaaaatgttaatggatgcaaaaccagatattttaaaccataacattgaaacagtacgtcgattatctgaccgagttcgcgctagagcaaaatatgaacgttcattagagtttttacgtcgagcgaaagaaatgcagcctgatattccaactaaatcgagcattatggtgggcttaggtgaaacgagagaagatttaattgaagcaatggatgacttacgtgcaaacaatgtggatattttaactcttgggcaatacctacaaccatctaagaagcacttaccagttcttaaatattacccaccagcagaatttgcagagcttaaagaaattgcacttagcaaaggatttagccactgtgaagctggcccacttgtgcgttcttcttaccatgcggatgagcaagtacgttctgcaaaagaaaaaacagcagaagctaaataatgaaaaaagagagctaacgattagctctctttttgtttatactctaaaacggtatttggacatgttaataaaatcttttttaattcttctgtggataattcaattgtaaattcaggtacaccaggtgtaattaaaattttatcgtacgtataaatagcgttatccacaataattgttacatcgtgtgaatatccgaaaggagccacacatcccggcgtacaaccagttttgtctcgcagttcatcaggagaacagagagataagcgttctcctgttagttctttcatctctccccggttgagccttgtgccctctaacgtaaaaaatacgtaataatctccagactttgattttaaaaataagcttttacttggagtgccttgtaagccgagtctctcacgtacaatccgatctgtctcataatcgagtactggttcgtgttcaaatttttcataagaaacatttgttttatgtagtagagcaagtacatcttcgtacatatggagtgatacccctttctattattagtacagtttcttctcgtggcgtcaactgaatgttttggaaagggatattacttagacgatgcttcccataagcgttttatgatacattgttcgtcgattgtaatttcgtaaatatcaggattcgttaaagttctccattcattaaagccaatcgtatgattaaaatgctttaaaatgagcgtaagtaaattgccatgtgtaacaagtagtgttgttgtatggtttaattgtaaaacgtcttgaataagcgatatggcacggtctgttgcttgttttgttgactctccgcctgaaaaggcaatatctatatttgtaaaagtagattctagtttttgcatccaatcatccattggaacgttgctcaatatgcgttcagttaatcgttcatcttcttggatagataagttagcttggagcgcatagggccgaatggaatcgatagctcggacaaatgggcttgaaataatatgatcgatttgtagatgattttctaagagaaatgtagcaagggtatttgcttggtcttttccatcggtcgttaattcagcatcacgtttttgcccagttgctgaacaatgtcgtattacaataattttcttcataattcatccccatctttcaagttgacgctatatacttcgacaaatgtggaaataattcctttttcttgtaaaacggcatatggatttaaatatgtggaaaagtaatgtggataatgaacatttgaggtgcaatcatgaataaaatgatatgtattgtagttagtctttgttttttttatacacttgtccacaacttatgcagagtcgaatcaaaaagtaaattatccaagcaatcgaaataagtcatttgtgagtgaggatattttttataaacagttagataagaaaatttataaagaatacaataatgcagcatatagtgttcgaaaaaaatcttatttaaagaagtgcccgatgaagaattttctttcctacaaaaaacagccgtgggttgtcggagtagtgtgatgcttcaagatttttttgttcatcctgatcgccaagtttatttttttgcttccttttctcaaaatgaagtagaagagtttcataaatatatcgttatagatgcagaaacaaagagggagctgcaagaaggaaaaagctatcatcattgcgacaatccataaaaaataaaccaccaatcggtggtttattttttactccggtacactcattaatttcgctttcattttgcgaataagaacgacagcgccaattgtacaaagaagtgtaattccttctgcaacgaagatattgattgtttttgtttggtaaagggccgcgaaaaagtctacaaatgcgtggaatagtatagcgtatactaggaagatatatttcttctgttttactgcgtataaaacaagcattgtaaaggcaatttgaagcacgagtgccataattctttctaagctaccaaggaagtataagtaggcaggttgctgaattaacatgtcctgtaaaatgctcagctcgggtttttgttcaatcagtcgagcgaagctaccatcgttaatagaattagcaaagattaatgcttgtaatgcagaaaaaccgccaattaaaatagattcaattccgccgtgaccaattccataagcgaagccatctttatattctagatatttttttagtaagaagaagaaggcaacgaagcgtcctaattcttcaaaaataccagcagtcaatccgccataaattgcgaagacaaacggattttctaaaaatggagcgattgttggattaccgcgcataaataggtggaatggtgtttcaagaatttgagtaaatccgataaagataagaacaccaatgccgactactttccaattcatattatattttttacggaaataaacgagtacaataattgggaccagaatcgagacaatgagttgaaagatgatgctggcaattacagtatttgaaaccatactttcaccgctttctaatatatgtacataactattatgcatcaaatataggagagatgaaactttttaagataaaatgaatttacttattgactctaacgttgcgtcatactttatcgtatgtactaagggggagatacaaatgacaatgagagtaaaagaagtagctgatttagttggaattagtgtgcgcacactgcatcattacgatgaaattgggttgttaaccccagacgagacgacagagtctggatatcgtctgtattccaatgaaaatttagagacattgcagcaaattttgttttttaaagagcttggcttccctttgaaaaaaattaaagagattatcatgagtccatcatttgatcgcgaagaggcactagagcttcataagaaaatgcttcttgaaaagcgtgctagattagataaagtgattgcgacgattgataaaacaattcagcatacaaaaggagagattgaaatgacgaacaaagagaaatttgaaggattcgatttcagccataacccatatgaagaagaagcacgtgaaaaatggggagatgcagctgtagataaagcgaacgaatatgcaaaaggtatgtcaaaagagaaccaagaggagtttaatgctatttatagaaatttagcagcgcttagacacggagcaccagattctaaagaggcacaagaagcaattggagtgtggtacgattacttgcaaaacttcggtgcatattcattagatgcttttaaaggactcggtcaaatgtacgtcgctgatgagcgcttcacgaaaaatatcgataagtttggtgaggggttagcgcaatttatgtgtgatgcgatggaggtttatgcgaatcgtaataaaaaataaaaagtaaaacaggtggagattttctccacctgttttactttttaatcatatcattcaaagtctgatctcccgtattgttcaaatgaggatttttactcatttcacgttttagcatatcgaggctttgcgtatattctgtatcatttaatgcgccagattgaagaccttgaatttgggaaatcaacttttggtctgttgatacatatcctttataatagcgagggacgatggacaaagcagctctatatacttgatccgctacgagttttggatccgttgtgtttgcacggtatacaacaaatacttcatcatcggtaacgagcgtagcagcgtttgtaacgtcaggaagtttgactgtcatgcttgtaatcatttcagcgactttctcacggttaatggcccctacttgtttgttagacacttcatgcttttgtttagatgaataaccgactctcgttaatcgtgtatttgtattttccgtatgatacatgtcgtttttgttggaaacaagaacacggcttccttcttcacgttccatttcggctttattcgttgattggcagcctgcaaataaggaaagagtgaggagagagagtataatttgttttttcacgatgtatcacctccttctccatagcatgcactaattttcaattttttgtatttgaaattgttggttgttatgctttgtgatacgataaaaagaagaatgcttagagaggaagttaatgatggagcaaaagcaagagattcatgctacggtgagcattaataatgtgcagtacgaagtaattaaaaactttcgtgacggttttagtgaagaagcatttaaagagcgctatgcagaaattttaaataaatatgattatatcgttggagactggggatatgagcaacttagactgcgcggattctttgatgatagtaaccagcgtgcgacatatgatacgaaaattagtacgttaacggagtatttatacgagtactgtaacttcggttgcgcacattttgtattacgaaaagtgaagaagtaaaaaaactcttacgattgtaagagttttttttcgtagcagttataccaattgtgaggaggctgtttacttgaaaaataaacagcacctcgacaaatataatgattcttttcatacaagcgcaatgaaacgggattgccagtgaaagcatctaatcgtatgcccgtatagtcttttcgttttgcttcattttcccaaaaggataaaagtactttgctatatccttttccttgggcgaaaggatggatgacgaaagaatggacgataagaaagcgaccgtgtgtttctgaccaatcaattagctcatattctggagattgccactcattcaacacaacagcaccaacgagcgaatcatgctcaaataggcagtagagttcaccttgttctaagtgataggcaatatgttctcgagtcggatatgaatcatcccattgataaattttcttttgtaagagcgcttttttacattctgtatacattgcatctaattcgtctaataaattcatcgtaccttttctcacatttagcatgagactcccccttataaacaaattgaaatagaatctccttcagatagtattgtatttggcttcatttgttgtccattcaattgaatatccccatttttaattttatccacaatgagtgtacggctccagtcggaaatatatgtggataaggctttatcgatgcggtgggaaccgaaaacgatgtctaatacgatcgtgattttagctatgccgttttctttatgttgcataatggaaatagtagtagttgtttcggcttgatcttgctgcgtcatatcgactgtttcaacgtgatcagtaaatgatttataaatacgcagtttttgattccacgtatgatctttcggacatttataaatggcaaagcggtatatgttttttccgttggcgttatgcctacgaatattcgtgtcagtaaataaggtagtgcgtctgcaatttttacaatacttttcgattgtgttttgctcattttcatataaactccaagaaagttgtactttctgcatttttcttcacctcttatagtagtggcaaagaaacgtaatacagctatttggatgtcttgtagtatgaagacatgagaaaaagacaaaaataaaaggaggttcccttaggaacctccgtaaacatcatactacagatgcgttacgttcctttgtaatgggaatgggcagactactcccttgaaaaagcgtggtgcttttttgagagtaatgctatccaattgctggtccattacaaagtaaatgttggcatacgtagataacgtcctttctatccaaatagatttattcttaattataacatattagtttgaaaattaaaaataattacaataaaaaaacaccagctaaaatagctggtgcatacgataaattatataagttcaaataaaaatgagcgtaattcttctgcaatttcttcagtcatagaaaatgcgtgctctaagtagcctggttcgtttaaatcgtcagcaccgatgattgcaaatttattgcgttgcatatcaaggacaattgttttaccgtaatgacgatcggagtataatagcgctaaatcgtgacgctcattttctcccataaagctaacgaaacgagtttttgtagcgacagtatcgtcgtacagaaagaaacgttcttccatacacatggctcctttattaaatatctaagtttaagtgtggtttatgatctaaatggtgatgcgttttaatgaatcgtactgttcttgttttgtaacgcattacgatagagtatgtttcagctaaatctccaccaaggaatttaacaccgtctaataactcaccagcagatacaccagttgctgagaagattgcatcatccccagatactaagtcatctaacataagaagttgacgaggatcttctaatcccatttcacgacaacgagcttcttcttcttcgttcattggaactaaacgagcttgcatttcaccttcaaggcattttaatgctgctgcagaaataacaccttctggagctccgccaatacctacgaataagtcgatacccgttccaggtagtgctgttgcgattgacgcaccaacatcaccgtcaccaaataattttacgcgtgcaccttttgcacgaacacggtcaataatatcttgatgacgttcacgttcttgaacgataactgttagatcgcgaatctttttattgttagcttctgctacaatttcaattgttttttcaattggatcatctaagctaattttaccagctgcttttggaccaaccgcgattttttccatgtacatatcaggagcatgaagaaggttccctttgtctgcgattgcaataactgccattgcatttgcaagaccttttgcaacgatgtttgtaccttctaatggatcaacggcgatgtctacttctggaccgttacctgttcctagttcttcaccaatatacaacatcggtgcttcatcaagttctccttcaccaattacaactgtacctgccatgtttactgaatcgaacatatcacgcattgctgtagttgctgcatcatctgcttcatttttctttccgcggcccatccactgtgcggatgctaaggctgctgcttctgttacacggacaatttctagtgcgagttcacgttccaagattccattcctccaatttcaaaaatcatacaaatataactataacaaataacggagaaaaggtgaattcgaaaaattgtcgattttttcagaagaaagcgttacaattaaaatgtaaatgctttaatttccaggtaggtgacattcatgtattttgtagacagaaagaaaatagaacaaatgctagtatgtttagaacgagcaacaagtacatttcaagagaaaaagatatatgaaaccgagtttgaattttacgcattagagcgcatagcccatcttattattgattgtgtattagatgccgggaatgcgatgattgatggatttattatgcgcgatccaggaagctatgaagatattattgatattttaatggacgagcgagtgataagtgaagaagatggacaagggatgaaagaaattatccttcttcgaaaaatgcttacgcaagactatattcaaatgaatcatgatgaattatataagacgattcaaaaacatattgcagtggtagagaaatacccagcaaatattcgcagttatttagaaaaggaattaggacctgtatctgcatttgtaccagaataattatgcttataagatccccagagaatgccttttggggatcttatattgtatgtgagaaagaaaagggagaagggtgaagtatgggggaagcacgtacgacgaaagacgaaattgtacaattgttgaaagtaaagggagagcacacggtagctgaactagctgacgttttagagattacagaaatggcgatccgaagacatttaagtaatcttgagaaagacggactcatttattctaagatggtaaggcaacatgtcggaagaccaacttatttgtatggattaagtgaaaagggagaagatacattcccgaaagagtataagcaatttgcgattgatatgctagaagatttagctcgaatgggtgatgaaaaaatacttcgttacgttttaaaagagagaacgaagcgaatggaagaacagttacaaaagagagtgagtaatcaaaagaatttagcatataaagtgcaagagatagcagctatgcaagagaaaaacggttatatggttcaaataaagagagatggagagaattctttcgtaattgaaaaacaaaactgtccgttaaaggaaattgcagagagattcccgcaagtatgtaaagatgaaaaagagatgtataagcgtttatttgcaggagcagatgtaaagacgttagcaaatatgtgtgagggcgattgtagttgttcttaccaagtaaaagagaaaaaatgaacgttatggggcgcttttaggtaaagcgtttttttctttggaaaaagcgggtaatataagagtggtatgataaggtgagaacgttagcatagaaggagagacataatcgatgtataaaggttacttaattgacttagacggtacgatgtatcgcggggaagaacaaattgaagaggcaagcgacttcgtaaaagcattaggagagcgcggcattccttatttattcgttacgaataactcaacgcgtaaaccagaacaagtggcagaaaaacttgttcgtttcgatattccagcgaaagcagagcaagtattcacaacgagtatggcgactgcgaacttcatttatgaacgtaaacaagacgcaactgtatatatgattggtgaagaaggcttgcatgatgcacttgtggaaaaaggatttgaacttgcggatgaaaatcctgatttcgttgttgttggtttagatcgtgacatcacatatgaaaaattagcaaaagcgtgtcttgctgtgcgtaacggcgcaacgtttatttctacaaatggggacattgccattccaactgagcgcggattattaccaggtaacggttcattaacatcagttgtagcagtatcgacaggtgtggatccaatctttatcggaaaaccagaatcaatcattatggaacaagctttaaaagtgcttggcatagaaaaaaatgaagcattaatggttggggataactacgatacagacattttagcgggagtaaatgctggcatgcatacccttcttgtccacactggagtcacaactgtggagaagttaacagaatatgaagtacaaccaacgcaagttgtgcataacttgacggagtggattgagaagatgtaatgaagaaagctgttccaaactttggaacagctttttttctaatatttgcgggcagcccgattggtgtgggctaacattcagttgtgactagtgtcgatttttgtcggtaagtcgatatatttgaaaaatcgccgatataatatgagttgcgccgatatatttagaaaatcgctgatataatatgagttgcgctgatatatttagaaaatcgctgatataatatgagttgcgctgatatatttagaaaatcgctgatataatatgagttgcgctgatatatttagaaaatcgctgatataatatgagttgcgctgatatatttagaaaatcgctgatataatatgagttgcgctgatatatttagaaaatcactgatataattttattaaaaagcacgattcacaacgtctttaacctcttcaagatattgtttacgcacactgtcatccacagaaggaacacttgtatagaatgtatgctcaattgtttcaatgcctgtaaattcaaaaataccaacatccgctgttttcttcatcgcatcaaacatgccgcctgctgtgtatgcttctttcgtattgcccattgtagataataacaatccttttttaccgcttaataacttttcaataccgttttcaccgtaagcataagcaaatccatggctaaacacacggtcaacgtatccttttaaaatagcaggaagtcccgcccaccaaactggataaataaatgtaatgctatcagcccaagagatatgctcttgttcttctttaatatcttctggtgtatttcctttagaaaatgagatgaaatcggaagcgcctaatactggattaaagtttaattcgtatagatcgcgaacgcgtacttcgtgaccttttccttctaattcactttttaccgtttctaaaatcgcatggttgaagctttctgtattcgggtgtgcataaacgattacatgtttcatttttcttcctcctatttgtggatatgtgaatagttatttgtatatctgtaactattatggttactgtttttgtagaagtcaagtaatacatatgtatgtataaaaagacgcccgaaaatcgcctttttataccccgctcatacaaagtacaaagaagacaaataaaataatgacaagcccgatgccgaaattaaatacgagagtgctatccatatatgtagcctccttgtttgaaagtaaaaagcactctagttaagagtgcttttttattttgaatctactttataacttttagaaagtgattcatgcgtgtaatgatttacattattttatgtatttatactttgaaatgagtaagtccttgttggatatagaaaaaaagacactcgttggagtgtcttttaagatgacaaaatgtgccaattgcttgaggttgataagacgctaatttccgtgttaacgccttttctttaatcaagaagtgtagcaacagcgattcaaataaattgtaccacttgtttaattatggtgcgtatgcaattgtgcatattatgatcatggggtaggtaatgaactgtgaataatttgaagtgatttatttacgatttcttctgcagcatatatgccaattgcgtctgtttttaaaatatggggttgtaagttatcatgcattgcccctaactcaccatgaagtggtgcgaaggcatggttcgccttttcaagcatgcataaatcaagtaaagaatccccagctgtaataatcgtatctatttgcaaaatttcttttatatattgcacagcgtcccatttgttaattggttttggtacaaagtatagctttctaccttgaagtgaatgattccagccttgtttgtctaaccaggaagtgaaagatgataattcatcataaggaatgttctcccgtttaataatgcaataatggaatagatcatcggctgttttttgtgatataacccaatctttatgagctatttgtccaaattcctttagtatgtcgtttctctctatacattcaaccgatagtctttcttttactgtcctgttccaagtaccatcttgtttcccgttatgaaggatattaccgccattacttgtaatggcgtattcgggaatgatttcgtcttggaataaagcaatccgctgaaactgctcaatagttcttgttgtaactgggatgaaatgtgagtgcagttgtaatttttttagtagtgaaatggttttatgtgatataaaagaaatttctttcccatctaaagtttcaatgagttgaattgattcatcttctataggggcacgaaacgatttccgggaataaataagcgtctgatcaagatcactggcgaaaatcatatcgttttcctcctaaggggcttaatgagcccgcaacatgaataagccatattctcatagatttcaatagagacattcttttctttagcaagaagtaaaatatgctttaaatcgggattgttttgcttacgtattaaaattttccacggtattctccggagtaatacgcgagttgtttcaccgactcctggtttaattaagttaatatcgtcaatttcaaagtgattttggatagactgtatatcttttaatccttgccaagagggatcagtgtaagttgaagtaatataacgtaattgattatctatatgagaatgaacagaagggaataaatctgttacctcatcaacgaagaaatttgataagtcttcttgctctagctctttataatatttaacaccatgaaaatcatttggaccgatataggtgtcatttagtacagtgcggctaatgagtccagagactgttgcatttaagcaagcgctaggaataagaaaatcttcacgtgtaccgtaaattgaagtacagtaaccgggatcagcaagcacagccatacaatgagaaatgtgtgtattatttcgttcgttaaatgtgtgtactgcatattctaattctttttttattgcaccttttccagtccacccatcaatgaattgaattgtttctttagggtgatgttccaaaatataatggagtgcattttcatcaataccgcgtccgcgaacaatagaaatacaatagtgaggtacatcaaggttgtattgatagcgtatgtagcgtttgataagaatgccaataggtgtaccagcacgagctaatgaaacgaggacaaggttagttcctttagtttgtataatctgttcggcgacaactccaacagcgatggctagtttgtgtttgtattgttgcagggaagaaaagaataaatccatatacgctttagagggtttatattccattggtaacatttcggaataatgtgtgccagcttgaattgcttgttctctagtttccgtggaactttctttcattaaatcactaatatcttttaatagaaaaatagcatcatttggattgtaactactaatatgagaatttacttttaccataattatcaaccttccttttctatgctatttgaaaatgagacgatatgaataaaaggaataactgtttgtaactgctgtagaagaggagatagggcttcttcccctaaatcacgctcaatgaaaacaaatacttcatcgtaatcatgaggtgaaatattataaaagtaatttgtaatagtagaatcttcaggacttggatatgagaaatgattatgaatggcgtagttcacatcatttgaaacagaatggatagggcttcttgttgtagattgatataaaatattttcacccatttcagcagcaattttcattgggatatacataaattcacccgttccgagacagagtgttcgttttccaattctttctctttttaaagtttttcctgcttcttgggcgaaagaatgaatgtgcttttgttcatatgctgaaatgccaaatcgcccagtatattttatataatttgatgtatagggtgattttaggcaggtaagggtatgttttttgaaatcaggttttgtttcttcaatttgaatctctttttttgcaatatttaatggttggccagttgtatgaatactgccttctaataaagaaataacatgaaccttaatttgaagttcttcttctaattgtttaaattgttttctattagtatgagaacgccagtctaacaaagaagcaattatatattcttctcgtgggaatttattttgaatagatctaataatatttaatgctgtttttcctgttgtcatctcatcatctacgagaacaattggattgttgttttgaaaaaagctttcatctacataacaacggtgtgatgttgcatgagaatgttcttcctcaaatgtaatgacagattctaggtggggtatcgattccctagttgtatgtacatactttgcattttgaaagcattgaaacatagaatgaccaagtgatgtcgctgtttcagcgaatccgatgaacaaaacttcttcttgcagaggatattgataacgaaatacttcctctgggatttcatcaatttctaatgaaatgagatttaaaatttctttttgaaatggatgagaaatattatgtagtatttccatatatcttgcagcgagagcaactccacttgatagagagactgcaggtttaataggaagatgctttccaaggattgtactcacaaataaaaaactacgtttcttatttattctcgcagccatttgaaaaagattgtctagcgctaaattatatggattatcacgtacttctacatgaacttgtatattatttaaaacgttatacgtgttgctttgcgtttgtaataaggagatcggtgaattgtttgttttcatgtagcaccccgtaaatattagattttaaaatggttttgcgagcccagccataatgaggttttacttcattcattttgttagaaaaactgctttttagcactccattatacgtatctgcattttgtaaaattaatctcgcatctaaataatcttccattgtgacaatgtgcattgcctgtacaactttaatatgagatgggtgaataactgtctttccgattaagccatttgcatggtcaagtgatacctcttgaataagcccttcttcatgatcattagaaaaatattcccatacacatcctgaaataatatattcatttgttgcccttgagaaaacgttaataatgtctgaaatacaatcacggacaacagtaatatgatagataggtgtgtatttattgcgccgaatactaaatatacttgaaaaatcagtagcaccaatacgtacatttaagatgtaatcgtgataagaatctagtaaatcctttatttgtaataatgattctgcccgtgtttccttatacataatttcgggtgattctaaaatcggcatgccatatagcgataatgagtataactcgtttatatatgcaagctgatcgatataagtctttccgttaatcggtgtgaattttggaaagacaaaaccacataaacaatgaacagcactacctaattcagtaacaattttcttcatttgacttggctgtcgaactctaataaaaagaagtgggatgtctgcttgatttagtatgttggcactgactaagttagcgatttgctgtatttgaacgacgatgttttgctctgcaagttttacttcctcatcgcttatagcgtcctctagacaaagaataattgagatagcatccacatgtttccttctaattatatcttccgcaatcgtttctttcgtgccaggagtatatagtgtagcgcctagtgcgtaagctagttgttcttttcctatattttttgaaaaactaagaggttctttatagaaaaaattttgccgttcttctgaggagagataagaaaagtaattcaaattgtcaccaccttatttataatgattctgtttaatcgtaacataataagaaaaatcttccataaaaattaagcaagaaattaaaaaaatatattgagaaagatgaattataagatgaatatcgaatattgttaatagaaatataatagggggaaagagaaagtggatatacataaattaacagaggaagaagcaaatgagataaatacttggacgtacgaggaaccatataatttatatagtttttcaggcgagaaagaagtaatggaagagctattagatggaacgtattatggctgttgtgatgatcaaggagacctcatcggttatttttgttttggagcaaatgcacaagtaccaggtggaagagatgctcatttatatggtggaagagatgctcatttatatggtggaagagatgctcatttatatggtggagaagatgtgattgatattggacttggcatgaagccggcgttaaccgggaaaggaatggggaaagaattcttccaagctggaatagcgtttgccacgaaagagtttaatgcaaaaatgtttcgattaagcgtagcgacatttaatacaagagcgattacgttatataaaaatatcggatttaagcaagggcctatttttttgagtcgcggaagagaatttatgctgatggaatatgaaagaccgtcagcatgaacctgacggcctagaaaacactattattctgagtgctcagctcggtgcgctaaacggcttgaagcagcggcagcgattccgccaacgatatcatcaaggaacgtgtgcacctttccagttgatttatcatttaagtattctaaaataccaggttttaatttatcaatatatccaaagttcgtgaaaccgatagagccgtacacattcacgatagaaagtgcgataacttcatcaattccgtataagccttcatcacgttttacaatatcttgtaacggttcacttagcattcccttttcagcaaggacatcaagctcgataccagtaatcagtgcgttttgtacttcacgttttgatagtacacgttctacattgtaacggcattctgacatctctaaatttggatgatattttttttgaagaaaatgaacaagttcagcaatatcgtcaattgttacaccgcgttcttgtaatagttttaatgctctttcttgtagttgatttgattctttcatgtttatcacctttttttctttttagtatttgtatacgtttcgttgctttatcatgtgcataggaatgaaaggcgagcacaagctcatatatataaagaaaaaccataggtggcgactgcgatgattcagcatatttatgagcattatcacatgcatgttaaagaattaatcccccttggcccctataaaagcttttggattcgcaacaaaatttatgtacttgttccaattggagaaatggaggaagaagtacttgtagagatgaaaaagctcagtgattatatgaaccagcaaggggatataactgtagcgactttcgttccgactatacacggctactatgtaagtgagatagaagaacaaaattattgcttattaaaaggtatgcgcacgttagaacgacatgctatgtcattaggaagtgagctttctatattccataaacgaggtgcattctttccagaagaaattgagcaattaagccgaattggtgaatggaaagcgttatgggaaaaaaggctcgatcaattagaaaagttttggcaatcacaagtgatgaaccacccttcagatgtattcgatcaattgtttattgaatccttcccgtattacttaggagttgcagaaaatgccattcaatatgttgtcgatacagaaatggatgatacgccgcaactaacggatgcagcaacaatttgccaagaacgattcacacctttattatggcatcaaacgaagcgtctcaaacttccttttgattgggtgtatgatcacccgagtcgagatattgcagaatggatccgccatatgacgatagaaaaaaagaaagactgggagcaaacaatcgttcaatttgttacggattatgaacggaattattcgctatcctcatttggctggcgcttattatttgcaaggctcctgttcccgctgcactattttgaaacggtcgaacgatattaccaaactggaaacgaagaacaaaaaagcatatatagagatcgcttagaagccattttacacgatgtgaaccgctcagagcaatttatgaagcatttttatggttcgcttcgtttaccagtagataagcttgggattagaaaattagattggttatcttaaaaatataaaaaagagaccgagtgaggtctcttttttatataccacaattttatgtaatacattatgcccctacctgctgatctgtacatatatttaaaacgaattgatgcttttcgagcttttcatttactttacccaataattcttgctggatttctttaaataaaaattgatagcttgtattccacgttggtatagcggatgaaaggcctaataaatactcttttttcttttctagttcttgaattgttaaaaaagtgttccccatttttggcatgtgtcgtccccctatgttttttactttatatgtgtgaacgattcactatatagtattaattatcgcattttttgagagggatttccaattttgttttatgatgttaacggataaatgtgatttgaataaaaaaaggagaccaaatttggtctccttttagcaagtgactttgaacgagccgcttccgcttttaattaaaatacttgttctacttcgataacgcctggtacttcttcaagtaacgcgcgctcgataccagcttttagtgtgattgtagaacttgggcagcttccgcatgcacccataaggcgtagttttacgataccttcttcaatgtctactaattcaacgtctccgccatcgcgaagtaagaatggacgtaatttatctaatacttctaatacttgttcttgcatatgtgggttttccatttttatcgactcctttcatcagttttattataatcaagatagaggggaaaatctattttttctcttcttgttttattgtcgaaattttgtatcgtgttttttcagtataggggtatggaataagtttgtaaaatgatgtgcttatgtaataagacatctgaatatactgttgggacaagaagtgggggagaagaaatggttaatgttcaagtgtatgggacgaaagtaatttgtgcgagctgcgttggaatgccatcttcaacagaaacgtttgagtggttacaagcggcaattggtcgtaaatatgaaggacaagaaaataaatttaatttcgagtatattgatttccaagaagaacaagaagatgcggataaaaaagcattcgcagagcgcgtagtggaagaagatttattttatccggtcgttcttgtaaatggagaaattgttggagaaggaaatcctcgtttgaaggatgtttacgaagaaatcgagaaatatttataaaacaagaagtctttgcgaatttgcaaaggctttttttattggagggatagatatgaaaaatggagtgaagcatgcgttaccaacggaagtagagcagttaatggagcggtacacagtagaattaaaagaaatttttttggatgaaaaaatagtcggggtatatatttacggatccatcgcactaggtgcatttcataaggaaacgagcgatgttgattttgttacagtgataaatgattccgtgaatgaagctgaaaaacagcagcttgtggaactacataagaaacttagtgataatatgctaggtaaaagaatggacggtatgtatattccgcttgctgacttagggaaatacaatgatgaaatgaacgagtatgtgtattgtgcagatggtaaagctaatgttggtcattgggacattaatgcggtcacatggtggacgttgaaaaatcaaggcattacagttaccggaaaagaagcagaagatcttccgctgcaaatacaatggaatgatgtagtaaatacgatgaaatacaacgtagaacagtactggagtgggaaggcgaagaagccatatttattctttatagaagaatgggtagaatcagcggttgttacgatggggcgtattttatatacactagaccataaaacaatcgtttcaaaagatagaggactacaatacttgttagaacattcatcggaagaatggggacctttattaaaagaagtagagagaatacggcagaatccaaaagaaaagcgaatgctctcaaggtggagaagggcagatatgacgaagaggtacttactacatttaattgagatgtgtagagagaaatggtagggaagaaaatggacaatacagtggggtgtattgtcttttttattttgtagtagatagaaaagtatttacaagtattgtgtagaggaaagataatagaaaaaatatgtgcatgggggaagatgatgagtaaatataaattacatatagatagagaacaattatggaaaggatgcgttttaaattcgattgcccatgcaattaatgtagcgcattgtccagatttctcacatgaaagttcatgggatggatttaactatagtatgcaagatagccaaggcggacaaggggtaattacgtttcatccgaattatacgattgtatgtcttcaagatgtgaatagtgagagaatggatgagtggattgatgcgaaaagttattttgaaggggcaccttcggaagtaatagatattgcgaaagaagaagcacttcaatacgtattagaagaagtagaaggcgaaacagttccttttattacaactgcattttggattgaggatagtggtgcgtattcaattgattcatttgaagagatggaagagcacggtggattcttattagaaattccattacttgatacagaatcagcaatggaaagactggaagaagagtatgaactgacagaggaacaaatagagcttttacaactcgtgtatgagaaaaaaatccaaaggccaaatgaggaaattaagttgtctaaagaagaagtagcaatgattggaacggaagatagcgaaggattggaagctaataaggagtcatttgcagaaatgaatattacttgggagttgtaggataggatataaaattgtgataaaggactagtagaaagaacaatgtgaaattacattgcactttctactagttttttcatatacatatcaacttcgtgaaagaatatgggctctttttccttagtattcagatgcacggtgcaatgtaaatattgctgtaagtagcgattagcttgttcgtactgttttaatttgtagaaagaaaaacaagtaagaagtagaaacgctttttcttctaatattggaacgacagctagtaccggagtaatggaatgtatatttatttccactaaattttcataagatgtccacgtttgaaaccagtcgaaaatagtagaaaggtaacccggaatgttgatagtttcatgtgaaacattatgcaatagctggttctgtttgatatgtataggctctattctcgtttgtagaatgcaatcgaatattgaaatgttttcttttatttgtaattggtgcgtaataagctgcgggagaccgatagggtggactcctatatttatataaaagtcatctccaaactggcttttttgtatgttaatgagcttataaaatccgttttcagctttgaaaaatgtatgtctttttgtcttaaagccgagtggttttaaagtggcgtgtaaatttgtaataaaatcttgctcctttttagagccaggcttattcttcgtcatattcataagtagttaagttttgtaagaaactttcaaagttaggtgctaattcaataatttcctcaaactcattatcgataaatataactggaggattttcagctacatttcgatagtctaatgcaatccatgtatgtccatcaccagataaaagtatgatattctcaggcatttcccattctcgaattaaatagcggctctctaaaatactagattcattttcatcaaaagaaataccatataaaccagatacattaacgtgatcgtctgcccaagaatttggctttgaagtagggtgaacatcgagacgaagagttcccccattttgttcttttagaaggtttatatatgattctggaagctttacgttcagtacttcttctgcttttttgattagttcatcgttaatgggtgctagttttaaatagtcatcgtctgcccaaattgtactcttcatattcgatcacctcaaataatagttttaagaatcttatgtcatatattatagttagtttagataacatgcaatagagggagggacggagtatggatgtgtatgaatacctcgatcacgtaaattctaaagaagatttattaaaatttcttgtatacctccaaaaggattttaaagtgaatagagatgaatgggagaatgtagaggtagagacttatttagaggcattaaatagttggttaggttcttgtgaatcggtttatataaatcaaggagagaagtttccagaaaatatttcatggaagtttattgctcaaatgttacttgcggcagctcattatgaataaaattagatttttaaaagatagaatggagaagatatcttgattaaccataataaaattaaacaacttttagcacatgtagatcgtgctgatgataatgaaattgagctagagtatgaatctgaacctatgacgatagaattgtttaatagtgaagaaatagaagaagggcaacttggttatagttttgatgaagaaggtcaaagcttagtcgggaatgaagaaggagattggaaagaaggatggattgtaatagggatagattcatatcttggagacccgatttttgtagatagtaacgatgagaactgtccagtttatacagctatgcacggtgagggagaatgggagccggaatgtatagcggagcgtatagaagatattattgagaaagtgaaggggaatgtgcgagaaataaaatagtatttcaatgtgattaagagggaggaaatgtagtatatattcactaaaaaagatgtataaaaatgattttgatgcatcctttttagtgaatatataaaataattaacttagtgtattaaatatatgatacatgattattttaatatatttaaaagtaaaatgaaataagaaacggataattgtcggaatatattcgatttccgttcatttttatgaaatatgtgtactttttgttagattccttcattttgtgcatatacaataaatgtatatagaaataagaaaaggatgatgtacgtgaaggacactgttttacaagaaacgatttctccacaagaattacataaagttgttcaaaagaatacagcttattatgactttaagtgggggaaagtagaaaatccagcgcaagggaatacatggaattgggtagcctttttcttcccaactttttggttagcttatcgaaaaatgtataagttatttattatatttgcgttattggctatacctagtatatttatacccccttttatagatattccagatgggatttatgtaacatttagtttagctcttcaattaggaatgatgatatttactggatggcaaggaaaccgtttatattataagcatgctgttcgtgtttttcgtaagggagaagattcgtctgatcatgagaaggcgtatttcttacaatcaaagggtggcgtaagtattgctggtatgattggtttacaggttatagtcgggattgtgtttgggttagctgcgctcgggctgtcctttttaccaactgaaccgaatattaaaaacgttgttcgttcaagtggtgaaggggttactttagagattatgactgataatccaacttggaagtttgttaagaaagaaaaagattatgacgtagtagagtttactggttatgattatacagagaagaaaaacgtgaaaattaaatttgctgtttatttcgatgaagattatttcgagtggcaagaggtatatgaaaataataagaagttaagtgaagaagaagtggaagaatatcaaatttacattgaagaaaataatttgggtttctagagagaactcgttcattttgaaaagaagaatcttgtgaaggttcttcttttgtttattagggggagagaaatgatttcagcattaatagaagctctaataggatctattagtttaagtacgggtttacacacgaaaaagattgatgttaacatacgttacttgcagcagtatgaatggtttcgaatgatatatgaagacgagaagtatcaaaagttatttattacgaactacaaagttcgctcatatttacaaagtaagctaagagttcgattgctcgtaaaaaataaaaatgcacaacgaagatttttaaaattagtagaagagcaaatagaaaaacggcatacaaattgaaattttgtaaaatacaataaaaaatgagaatttgaggtagggttgtcaataacgtgagactatggcactataaagaaatgctatacaaattttatttatcgagatgtaaacatcaattttgatttttacgtataaataatgaacggaggaaatgaatttatggctactttaccaaattgtccaaaatgtaattcagaatatacgtatgaggatggcgttcttttcgtatgtccagaatgtgctcatgagtggggccaagaagcagaagctgaaaataatgatggtgcaaaagttgtaaaagatgcgaacggaaacgttcttcaagatggcgatgctgttactgttattaaagatttaaaagtaaaaggaacttcttcagttgtgaagatcggtacgaaagtaaagagtatccgtctagttgatggcgatcacgatatcgattgcaaaatcgacggtttcggagctatgaagttaaaatcacagttcgttaagaaggcgtaagtaaatagaagaggaggcgaatagccccctctttttattatgtcactttttgtcggtaaatcgatatttcgtacaaaatcgttgatatattctgagttatgatagatatatttgcaaaatcgttgatatattgcaagttatgatagatatattgaaaaaatcgttaatataatttcactcaccgagaacgatgcatcatttactgagcgaaagttacgatttacctcgcatcatagtcaacctctttcaactgacatcgcttattaaagaacgttttatatccaagctgtaaaaagataatgacagcaaaggcagtacttccagaaataccgagtatgatggcgatttgatattgaatggctgtgaatggtgatacaccggataatatttgaccagtcatcatgcctggtaagcttataattcccattccgaccatagaattaattgttggtaaaatagcagagtcaaaagcgtctcgaatgagcggagcagctgcttctttcggtgttgcgccgagcataagtgcaccttcaatttgacctctttgcgatttcatattgtttaagaacgtatttgcaccaagagaaacaccagtcatggcattcccaactaacattcctgtaatagggacgatatattgcggagcataccaagggtcatgaccgataataacaaagataaatagtagaagtggtccaattgatccggcgatcatggaaagggcggctactcgttttaattctttagacattgggatgttaacccgtttataaatattaaaaattgcaaaggtagtaatagaagtgatgagagcgattgtataaaatggattactgttttcaaatacgtatgtaaggacatatgcaacaagtacgagctgaatcgtcatacggaatgttgcgagcgcgatttgtttttcgcgaggtattccttttaattttacaagtccaattaaaataagaatgaaaatataggcagctgcaagttgccaaatttggagttcaataacgcccttcaactgagagcacttcctttctagttgcaccctttgttttgctaatttcaataatatcgtctgcaatttcttctggaagttgttgcgagtgtgtgatgaagataactgtttttttcttttttcgtgctagttcagtaaattgtttcataacgcggcgttctgtatcactgtctaatgctgaagtgggttcatctaataaatagacaggcggatccataagtacgatacgtgcaaaggcaagtctttgtttttcaccgccggataatgaggaggtgctatcttctaattgcttgtctaagctaacggtttgtaatgcactccgcagggcatcatcatttggaaatggtttttcagaaagacgaagtcccattaataggttgtctttaacggttccatcaaaaataggtggagtttgcccaagcataactacgtcacgacgtaattgaatagggtaataatcagaaattaactttccgttatattcaattgtaccggatgttggggattgtaaatcatttaacatgcgaagtaatgtgctttttccgcttccgctttcaccgataatacaagtaatcttttctttttgaatctgtaaataaggaatgtgtagtatatctttatatataacgtcttttaatataaacataaatcgctcctttctgattctagttatatcgtatcaaaaaaagaggggaaaatggttataacgaacaacgttttttcttcgtcttgagttttattaataagttaagtaaacgatctaattcttggctgaaagaaatcactttatcatgagtgaatccgtatcgttcaacgagatagattagctctttctttttcgcttctattcgattgtttagtttcgataagttcataagtggaatgtaatgcctcctacaaaagtatttatcacatgaaaaataagaccgaatgaactcggtcttaaaggaagtaataaaacaacttacaaatagcatacaatgtttatcaatattttttaatataaaaatgaaaaataaatcattataaatattgagaaagatgtgtctgataatttttaaaaactgatgcaaagaggctgcctacatagtagacagcctgtaaagtattaacctttatgatatttgtacatccaaagaagaccagattttaataatctcggtacacgtcccattaatggttggtttgctagtaaaccaaagccgtgcttcttaccaagagatcctagaacaccttttaatttaataacaggtagttcatccgggagtggttcattattccaacgttttaataatatttggacaatttgttctccttgaccttcagccagttgggcagatggtgcatgtggaagtgctgcgcaatctcctacaacgtaaacatgatcgttatttggaatattatgatatttagttaagacaacccgtccgctaccatcttgttcaactggaaggtttcgaacaacttcatttgcttgaataccagctgtccagacgattgcatcacattcaagtggttcatcgtggttgtacacaatatttggttctacttttgtaatgttagagtttcgtataatgttaactttatgctttacaaaccattcttctacgtatctacttaatttctctggatatgggaataaaattctatcttttcgatcaaataaatagatttttaaatcagaacggctttcacgaagttcacttgctacttcaacgccacttaagccagcaccaacgacagctactgttgcatttggttctagactatttaattgttcatatgtcttacgtgtttgttcaattgattgtagactatgtgtatattctctagctccaggaacgttatgatatttatcttcacagccaagtccgataattaaatcatcatattggatcgcttcgccgccatcaagatgaacagctttttcttcgaggtcaatatttgttactgtgccgtattgaatattgaggcgtgggtgttcaggaaacggtatacgaatatgcgtttctgaaatagtacccgcaactaatgcataatattcagttttgaagcaatgatatggtactttgtcgattaatgtcacttgtacatcatctggaagttggttgcttggaagtagcctttgcagaattctcattccaccgtagcccccacctagtattacgaggtgtttcatgatggattaccccttttctgttgaaatatcccctaatcataaaattttatattaataaaatattttgactttactcaatcaaattatatcgaatttgtgaacaaataacaatgcatgaatgaatactctgttgtacaataagaagaaaagtaaactgtttttctttttaagttactctttcattgtaagtagcatgttatatagaagaaatcatctactttgaagtgaagtaatgaagtaactaaatagtttagactgtgtaacgaaaacaacaagaaacagcttagttttcttcttatagataaagtgaaaaggtaatttgttttgtagtacaggggggagaattttgattaaaccattaattgaattttgtgtaggtaaccttgcaagtggttcacaagcagctctagaaaaattagaaaaagatccgaatttagatgtaatggagtatggttgtttaggatattgtggcatttgttttgaaggaccatttgcacttgtaaatggtgaagttgtacaaggtgcaacagtagaagagcttgttaataatgtatatgagtatttggatgaaaatccaatgttttaaggtgttgcgaattagcagcacctttttcattagataaaactttatttcgtggggaagactaatactgagtattagtcttccccaatcgaaaatagtaggataaataaaaaaaggccctttttagaagggcttttttcttacacaaattgtgtaagagtggctcatcgccaaacgttgtcaaatatgagaaacgggggacattcatattgtgttctaaaagcatgcattttatacttaacataacaaattatttttggagtgaatataaatgagccaattttcttttacaaaaatgcatggtcttggcaatagttatatatatgtaaatatgtttgaagagcaaattcctgaagaagatttagcccttgtggccgaaaaggtttcaaatattaatactggtattggagcagacgggatgattttaatttgcccttcagacgtagctccggtgaagatgcgtatgtttaataatgatggttctgaaggaaagagctgtggtaacggtttacgctgcgtagcgaaatatgcgtatgagcataaactagtagaagaaacagttttcacaattgaaacgttagctggtattgtaacggctgaagtaacagtagaagatggtgtcgtgacattagcaaaaatcgatatgggagcacctcgtctaacacgtgcagaaataccaatgcttggtgaaggtgaaacaccatttattcgtgaaaacttcttatacaataatcatcgttatgcatttacagctgtttcaatgggaaatccgcatgcggttatttttgttgatgatgtagaaaaagcacctcttacaacacttggaccagttctcgagacacatgaaatgttcccagagcgagtaaatgttgagtttatcgaaattttgaataatgacgagatgaacttccgcgtttgggaacgtggatctggtgtaacgcaagcttgcggaacaggagcgtgcgctgcagttgtagctgctattttaaatggaaagatggaacgtggtaaggaaattacagtccatttagctggcggcgatttaatgattgcgtggactgaagaaggaaacgtgttgatgaaaggacctgcggaagtaatttgccgcggagtgtatgagtacaagatagaagcgtaaagatgtataatggactaagaacagaaaggaaggtgtatttcatgattgaagtaacagaacaagcagcttttcaaattaaagatatgttaaaagatgctgaagatggagagaagtatgtgcgccttgctgtacacggcggcggatgtagcggtctttcttacggcttaggatttgaagtagaaccaaaagaagacgacacagttcttgagtttttcggtgttgaatttgttatcgatacagaaagtgctccaattgttaaaggagtaaaaattgactataaacaatctatgcttggcggcggattcacaatcgacaatccaaacgcgatcgcatcatgcggatgtggatcatctttccgtacagcatcgaatgctggtaagccagaagagtgctaagtttttagccaaaatagaaaaggcctttttagcgatggaataaaattgaagtgacccccgaaagttagacaggtcgtttcattaggcagcctctagggtatgaataacgttttttgacacttgggggtagtgcaaattcttaagttgatgggcatggggtaggaacagattataacattttattatatacgaggtttaaagaagaattaagtaaacaagaaaatgcatttttagctacgaaagaaacattcaaatcagcaggtaaaactgtattatatagcggaatagcggtgctaattggttttgcatcacttgctttagcaagttttaaattatatcaatcgacttcagcggtagcaattggtgttttagtattattactcgtattaacgactttaaatccatttttcatggtgcttttaggaaaaggaatgttttatccagttaaaacatttaaaggtcatgaggatagtcgcttgtggggattctttgcgaaaaactcagtagcaaggccatttgtcgctttaatcatcgtattcgtaatatcgattcctttcgtattaaaatactctaatacacttaattacaatgatttatttgaagtggataataagtatgaatccaagatgggtattaacgtaatagaggatcattttccgcctggtttctcttcaccgagtacattagtcattcaatctgataaaaagctggatgaaggaacttctctacaaattttagacgaattaactgataaaatttcgaaagttaaaggtgtgtcagaagtatatgcaccaacacgtccaactggtgagaagataaaagaattatatttaaataagcaagcgggagaattgaatacaggattaggagatgccgatggtggcataaaggaaattaatgatggattaacagatgcgaaaaataaaatgggaagtaatgattcaaatagtcttgcgaatgttcaaaaattaattgatggaacgaacgaggtgaaaaacggggtatcagcattaggaacagctttacatcaattatcaaatggcataaacgacggtgcacaaggagcacagcaaattgagagtggtttagcttcagtaaacgaaaatataaatgttctatctaatgcaacgtcgcagctgcatgctggttatgcacagttagaaaaaggtttaaactcttacgatcaatacttcggaagtatttctcaagcgattgatggtgcgaaaaagggatatgaacaaattgaaatgttaatgaccaatttcgttcaaacgaaaccagaattagcgaatgatccaaacatacaacaaacgataggaattgctaaagaggctcaaaagaaattaagcgtactttcaaatgaattaaatcaattagcaacacagcacaaaacggcgatgagttcatttaaagaagcgaatcaatcgttactgaaagtggataacggcttaaaagaaatgagcaatggagttaataagttacaaaagggagcagccgatcttaaaaatggattaaatgaaggttcttcaggttcaaaacaaattgcaaataaatcagttgagttacaatctggattaacgaaaataaacgatgggcaaggacaacttttaacgggccttaaagacctgcaagaaaagatggggcaattacaatccggtttatctaaaagtacagaagggcttggaaaagtaagtaatggcctgcatgacgcacaaaaatatttaggggagctcaatgaatcgaagagctctgagaagttttatattccaaaagaagtgctagagggagaagatttccaaaaagcattgaacacgtacatgtcgcaggatagaaaaattgctaaaatgactatcattttagatgtaaatccgtattcaaaagaagcgatgccaattattcaagaaatcaataaaacaatcgatggcactgtaaagggaacggaattacatgatgcgaaaacagcaattggcggaacaacagctagaaacgttgatttaaaagaagtaacagggcaagatttcttacgtacagctacaattatgttaattggaattgcgattgtattaatcgtaattacacgctcattactaaacataatatttattattggctcattactattagcgtacttcgcatcactcggtataagcgaacaaattagtgcacatgtattacatgtagattcattaagctggaatgttccattctttagcttcattatgattgtcgctttaggagtggattatagtattttcgtaatgatgcgctataacgagatagaaggggattcggtaacgaaaattgtaactgcatctcgtcatataggaggagttgtattatcagctgcgctaattttaggcgggacatttgcagcattaattccatcaggtgtattaacacttatacaagttgcatcagtagttggcgttgcacttcttctattagctttaattgtgatgccgatattattaccggcgttaatagggttaacgagtaaaatgaagagttacaaagagaaaataataaatacgaaataagaagagactgtagggaatgatttctctacagttttttcggtatataatatttcagatgaaaatgaatccgatatattacagaatgagcagtgaaaggttatatgagaaagaggtcgatgatatacatacaatagctaggggaatggacaaaaactatccgatttcattgtagaaaggtaatcaaccgttgctattcatccatcttctactatataatagctatagtctacaataattgagtcgtaatatgcgatttcttaagacaatcggtgagaaaacgctgaaataagcggtattagtaggaggacacaaatgattacagtaagtaacgttagtttgcgtttcgcggatcgcaaattatttgaagatgttaacataaaatttacgccaggtaactgctacggtttaatcggagcgaacggtgctggtaaatcgacatttctaaagattttatctggagaaattgaaccatcaacaggtgacatacatattacgccaggtgagcgtctagcagtattaaaacagaaccacttcgaatatgaagagttcccagtattagaaacagtaattatgggtcacacgcaactttacaaagtaatgcaagagaaaaatgctatttacatgaaagaagactttagtgatgaagatggaatgcgcgctgctgaacttgaaggtgagttcgctgagcttaacggttgggaagctgagtcagaagctgcaattcttcttaaaggtttaggtattggtgaagaccttcatgataagaaattgtcagaattaactggggcagagaaagtaaaagtattacttgctcaagctttattcggtcaacctgacattctattattagatgagcctaccaaccacttggacttaaaagcgattcaatggttagaaaacttcttaatgaactttgaaaacacagttatcgtagtatcccatgaccgtcacttcttaaataaagtatgtacgcacatggctgaccttgatttcggtaaaattcaactttatgttggtaactatgacttctggtatgagtcaagccaattagctttaaaattaacacaagatgctaataagaaaaaagaagagaaagtaaaagagttacaaaacttcattgcacgctttagttcaaacgcttctaaagcgaaacaagcaacttctcgtaaaaaattattagacaaaattacattagatgatattagaccgtcatcacgtcgttacccattcgttggcttcacacctgagcgtgaagtaggaaatgacttattaactgttgaaggtctttctaaaacaattgatggtgaaaaagtgttagataatgtgtacttcactttaaataaaggtgataaagttgcatttatcggccgtaacgatattgcgatgacaacattatttaaaattcttatgggtgaaatggagccggatagcggttcattcaaatggggtgttacaacctctcaatcttacttcccaagagataactctaagtactttgagaacagtgattacaacttagttgaatggttacgtcaattctctccacaagatgagtctgaaagcttcttacgtggtttcttaggccgtatgttattctcaggtgaagaagttaagaagaacgtttctgtattatctggaggcgaaaaagttcgttgtatgttatctaaaatgatgttaagtggtgcgaacgtaatcacacttgacgatccaacgaaccacttagaccttgagtcaatcacagcattaaacaacggtttaattgcattcaaaggtacaatattattcacatctcatgaccatcagttcgtgcaaacaattgcaaaccgcattatcgaagtaacaccaaacggtgtaatcgataaagaggctacttatgatgagttcttagaaaatgaggaacttcaaaaacaagtagatgcaatgtacaaaggtcaataatatataatgaaaaaactcgttctttttagagcgagtttttttgtcgagaaaacgtaacatcgctggtcggtcaaatgaataattattcaaatataatattaatgaacaggagaattctttcatgtatggaagggatgtaatgactttaagatttaaagagttagttgaagaagggaaatgtaagtggagtaatataatcaaatcgtattattttgtcatgtgaaatatgtaccaaatttggagatagaatagtttgcgaatgagtttataaaggtatatagtatggggtgtcataattagtggatgaatcttgggagaaaacaggaaatgttacaaatttattttgttaaatagaaaccaaggtcaaaatgtctagaaagaaatagttgaataaatactagcttcaaattataattactaatattcttcatatagttaaataaagataatctatttgaagaagaaaatttgaatagagagacagacttataaaaaataagccttggatgatcaaaagaggtggagaaatgaaacagttcttattaaagagcaaaagtgtgttaagcaatcattttggattctttctgtttgccgttattttattgtggctcaaaacatatgcagcttatgtaacggaattcaatttaggaatttcaaacacaatccaaaaattcttgctgttttttaacccgcttagttcagcagttctatttttaggacttgcattatttgcaaaagggaaacgatcttatatttggttaattatcattaatttgttattgtcgattcttttatacgcaaacgtagtatactatcgctttttcagtgactttattacgttcccgacattaacacaaacgaataactttggagatttaggtggtagtattcttgcgttgctacatctttatgatccattatacttcttagacacgattatattaattgtgttagtcgcaacaaaatttgcaaatccaaaaccaattcgtgttgcgaagcataaattatctctagtatttgtagtaggtattttattattcagtgttaacttaggtcttgcagagtctgaccgtcctgaattattaacaagaacgtttgaccgtaattatattgtgaaatatttaggtgcatacaactacacaatttatgatggaattcaaagtgcgaaagcatcaacagaacgagcattagcggatggcgataatatgacagaagtacgaaattatttaacatcaacttatgcaagtccaaatcctgagtatttcggtaaaggaaagggaatgaacgtaatttacattcatttagagtcattccaaaacttcttaattgattacaaattaaatggtcaagaagttacaccgttcttaaactcatttacaaaagatgcgaatacactatactttgataacttcttccatcaaacaggacaagggaaaacatctgatgcggagtttatgttagagaattcaatgtttggcttaccgcaaggttctgtctttacaacgaaatctcataatacgtatcaatcagcaccagctattttaggacaacaaggatacacatcagcagtattccacggtaactacaaaacattctggaaccgtgacgatatttataaatcatttggttttaataaattctttgatgcgtcatactacgatatgaatgaaaaagacgtagtaaactacggattaaaagataaaccgttctttaatgaatctattccgttattacaaacgttgaaacaaccgttctatacaaagtttattacgttatcgaaccatttcccttatccaatcgataaggcagaagcaacgattgaaccagcaacaacaggtgattcatcagtagatacgtacttccaaacagcacgctatttagatgaatctgtaaaaggcttcatcgattacttgaaacaatctggtttatatgataactcaattattgttatgtacggagaccattacggtatttcagataatcataatgcagcaatgtcaaaagtaatgggtaaagaaatgaactcatttgaaaatgcacagttacaacgtgtaccattaatcgttcgtgtaccaggagtgaaaggtggcgtacaacatcaatacggtggtgaaattgacgttcttccaacgctattacacttactaggtacagatacaaagaattatgttcaattcggttctgatttattatcaccagatcataaacaagtcgttgcgttccgtaacggtaactacgtaagcccaacagttactgcactaaacggcaaatactatgatacaactactggaaaacctgtagaatttacagatgaaataaagaaaaatgaacaaatggttcaaaactcactaaaatactctgaccaagtcgtaaatggtgacttattacgattctacacaccggaaggattcactccagtagatcgttcgaagtataactataacaaccgtgataaaaacaaaacgaaggtaaaaacgactccggaaggggaagctaaataaataataaaaggcgctattcatatgaatagcgccttttatttgtaaatataccatcattatgagacaaaaccagctgttgctttttgttttgcctttccgaagaaaactacaccgacgatgataataatgataaatgcccatttaacgaaagggttactttcgaaaaatccagcgaaccatttctcatctacaatcattttcgcggcagtataagctaaaacggctgctccgatcgtaatgatgacaggaaaacgatccacccattttaaaattaatgtgctgccccatacgactactggaatagacactaatagtccgatgattactaaagaaaagttaccatgggcagctcctgcaacagcgagtacattatcaatgcccattaacgcatcagcaataataatggttttaatagcagaccaaaatccttcttcggctttaatatcatgatttttgccctcagcgatcagcttgtaagcgatccaaataagaagtacaccaccaattaggagtaatccaggtatttttaataaccaaacgacaactaaggtagcgagagccctaatagcgattgctccaatggttccccaaatgataactttcttttgttggtctttcggtaatcttcttgctgctaatccaattacgatggcattatctccggctaacactaaatcgattacaataatggcaagcaaggcagacaaatattcaggtgaaagaaaatccatatacatatcactccttaagagtaatatgtgctaaagtgttgataatataaaaaaggattgaaattgtatattcaatccttttttgactgtattctgatatgtatgtttttattttgaataagtcgcttttgtagtttttacttatcgcgtttctttcttaaattgattccaagtttcttcagtttgcactataaatacgattatataacatctacttatttaaactaggttaaagatagcatgtgatatttcaaagttaaatttatttgataaaagggaagggacgtataatattgatatggtgcaagcgtgtataggttttctctataaggaaattctaaaaacgataaaaaagacttgataacctactagaggggatcaagtcttttcattacatacgattatcatgccagaagtttaatgggaagtgttcgttctcattatatgcttctaattcatatcctttttctttcagtcctttaataattccaggtactgcttttactgattgtggatgaatatcatgcataaggataacttctgttgggtttgtagaatgagctagaacgttttctacaattttagctgatgcagcatcaacttgcattttgttatatttccagtctaaagaatcaattgtccaatcccaaacttttaagccattgtctacaactttgttgcgaagagcttcgtttaatcctggcatagagccgtaagctggacgagttaatactggtgatttacctaaaacaccagcgattaagccttggtcttccttcatttcatctacgtaatgaccttcagtataaagtttcttgtagttatgagtcatactgtgcatcccaacgtagtggccttcagcatcttcgcgttttacaagatcagggaaagcttttacgtttgaaccaattaggaaaaatgttgcttttgcattttctttctttaacatatctaaaagctcagctgtgtattttccaggaccgtcatcaaatgttaaataagcgacttttctaacttgcccgttataatgttttggagcttctttcggagcaagagatgtttgaatctcacttacaagttgaacagattttgcttcatcctctgtactagctaaagcagtatgtactgatccaaaagccgcttcgtatgtgaataatactcccgcacaaactaacatagccctttttactaaagttgtcattcgaattccattgtgcataattttccttctctctataaaagttctactctactatattagcaattataggtagggaaatgcaaagaaacttttttacacttgtaaaaaagtttacccaaaagtatgcaagattttatatcaattgcagttttgaaaaatagaatgaatttaaactttattatttaaactttcaatcaccaaatcatactttcgtatcacttcgttttcgttccaaatattgattcgaatatttttgatttttattaaaatattcgtaaagaaacaattatatgaaaaaaggagcgggaatatgaataattatatttgcactacatgtggagtacagtatcccgaaaatgaagaagcaccttctcactgtaaaatttgtaatgaggaaaggccatatgttaatccaattgggcagtcatggataacattagaaacaatgcaaaatagcaatttatactaaagacctattgtttattaactaataggtctttcaacttaggaagctcacactaatgagggatgttaaagggaatatatctaacctatactaattactataaagctttggaaaatgaaaaggaggagatttgcatgaagaattgggttcaatttagaattgcaagaccaacagataaattggaagaagtgattagtttttatgaaacaggattaggattaaaacgtataggggaatttcacaatcatgaaggatatgacggggttatgtttggattaccagatgaagagtatcatttggagtttacttcacatgttaatggaagtccatgtccggcaccgacaaaagataatttactagttttttatatgcctaataaagatgaaattgaaaatatagtaaatcaattaagtaatatgggctaccatgaggtggaaccagaaaacccgtattggatagagaaaggaaccacaatagaggatccagatggttggagaattgtgcttatgaatgcatctgaataaggaaactattttcatatgaaatagagtgtagcaaaatgatttagacataaatccctacagcgtttgtagggatttttatataagaaaatcttattgagagagttattaaaatgtagaaagtattttggctaagaataaatgtagtaaacataatttatgaaggaggtataaaagtatgatagtaaaccattttaaggagttttctaaacatgttggaaatacacatctcattaaaagttctttcgtagtttatatcttattctacggaaaattgataccatcaaaaaactgtatgtttaacatgtatagttttttgatggtgtagctgtgcaatgtttaaaaatttcacataccgtattttaaaaataaatataggaaaaccaaaaagtaatgtagaatatatcgtacatacatatatacagtcaacataaaagataaagaggtgggtatatgttacttgaggaagtaatgcagcaactagaggaatatggaacagaacaaaatcgaaaaacgtataaaaaccacggagcgaaagagccgttatttggagttagttttgcgaatttaaaattgttaaaaaagaagataaaaaaagatcatgatttagcagttggattgtgggaaacgaaaaatatggacgcaatgacattagcaacttatattttagatccgaaaaaaataacgacagaacagcttaatagttggattcaggatgttgattattactgtttgatggatgttcttatgacatctatatgtacttcgccaattgcaatagaaagaatggaagagtggacaaagtctaatgatgaatggattggaagagctggctggtctttattagcaaatatagcgattaaaaataaaacgttacatgatgatttcttctctccgtacttagaagagattaaagaaaatatacataatgaaaaaaatagaaaaaaagaagcgatgaatagtgctttaatcgcaataggaattcgtaatgaagacttagagcgacaagcgattgaaattgcacgtgaaattggaaaagtagaggttgatcacggtgcaacatcatgtaaaacaccagatgcagaaagctatataaaaaaagcgagagaaagagctgaaaaaaagaaagtgaaataagaaaagaggatcggttatgaaagcaattgacgcagcacaaaacataattacattacaattttctaattgtgatgtagctttactcggcggaagcgttgtacgaggagaagcgacgaaaacatctgaccttgatattgtaatagttgaccaaagtttaacttcttgctatagggaatctttctatagtaatggatggcctgttgaggtgtttgttcataattttgaaacatataaaacctttttcaaaatggattgtgatcgagggagaccgtcgttaccacaattagtttcggaagggattgcattaaaaggggaaaaggaaattgttgagaaattaaaaaaagaagcgaatgatttactacataaaggaccagctaaatggaccgaagaaacgattaagcagaagcgatattttattacggatactttagatgactttattggtgcaacaaaaagagaagaagaattgtttatcgctaatttattagcggatttagtacatgaatatgtattaagagtaaatggtaagtggcttgggagttcaaaatggtttattagagtgctaaaaagatatgatgagcaatatgcaaacaaatttgtagcggcttttgattatttttataaaacgggagagaaaaatgaattaattcattttatagaaaagatgttagaacagtatggtggaagagtgttcgaaggattttctattggtaaataaaaaggggagagaaaaatgaatgtaccatatgttcaattaagagaattgacactagatgatgtagaagatcgctatcaatggtcattagatagagatgtaacaaagcatttagtcgtaccagatcaatatcctccgttcactcgtggagatacgagaaactggattgaagcttgtataagccgaaaaaatggttatgaacaaagggcaatcgttactgaggcaggtatacatattggatgggtagaccttaaaaattttgataaaacaaataaaaatgctgaactaggaattgcgattggaaataaagactattggggtaaaggatttggaatggcagctctaaacagcatgttacaaataggtttttctcagtttgaattggagaaaatttggttacgtgtagatgaagataatacaaaagctaaaaagagttatgaaagtgccggatttgtatgcgaagggttaatgagaaatgatcgattgagacaggggaagttcattcatcgcaatcgttacagtatattaaaagaagagtatgaatcaaaaaaagtagcctataaaaatattatgtaaattaaaaaggggaagataaaatgattcgattacttacaaaagcggatgcaaaacaatattgggagttacgtttacaagcattacaagtaaatccagaagcatttataacgacttatgaagaagcagtacgtcaagaaaatcctcttgaacgagttgctagtaatctttcatccaatagtagttttacatttggtgcttttaataatgaaaatcgtttagttggggttgttactttattaacagaagaaaaagacgcatataagcataaaggacatatcgttgcaatgtatgtagatactgaaaatcgaagaagtggtcttgcacgtgatttaatacgtaaagcaattgaaagggcaaaagagatgaagctagagcaattgaatttaggggttgtgtcaacgaacgaaccagccaaacgattatatgaatcaatgggatttaaaacatacggaattgaaaaaagggctataaaaatgaatggtgtgtatagtgatgatgaacatatggtgttgttcttttaagagaggaagttttgtatgaaaaaggcgaaactgcgacaataagatggtgaatatggcatatagcagatcataattggtatcatcaagctcatatcagtcgtttgaggaaattatacagagaatataaactacatattctttaatttttgaatgaacgaacgcccctaaataataattaaaggaggcgtttgtttttattcgttcgcttttcttcccaagctatcattaaatttttatgataatcttttggtttctcaatagaaaaccagtaaattgaatgtgcaatagttggtagccatcttttatagcggatgtgtatattttcatggtgagtatagtgggtcgagattaaagtagattttgacccttgaaaattttgatatgtaatggcctcgatttcataccaatgcactttattcccatgtaaatctactacaattccttcatcatcccaaagtgaaatgtaagtttgtatgtagatttttcatcgcgtatactaaaatatatgtcatagagataaaaaattaaatacaaggggttttacaatgaaagcaattgttatagggatattggcatcatttttctttgcctttacctttgttttaaaccgggcaatggacttagaaggtggaagctggatttggagtgcatcattacggtattattttatggttccaatgctattacttattgttatgtatagagggaacttaaagcaactctttcaatatatgaaaaacaatccgaaagaatggttagtgtggagtatcgttggatttggtctcttttatgcaccgcttagttttgctggagcgttcggaccaggttggcttgttgcatcaacatggcaaattacaatcgttgcagggattttgttaacaccattttttgcggtggatccactacataaaaaacttccgatgaaggaattagttatgtcgggcattattttattcggtgttgttctcatgcaagcagaacatgcttcttcattaggtattcgtgaaaccgttttatgtgtagttcctgtacttattgcagcatttgcgtatcctcttggaaatagaaaaatgatgcaagtttgtaaaggggaattagatgtatttcagcgagtactcggtatgacattagcaagtttaccattttggtttttattatctggttacgaagtatcaacaggcggattaccgtcaagtagccaagtttttcaatgttttattgtagcagttagctctgggttaatcgcgacagtattatttttctttgcaacagatcttgtgaaagatgatccgcaaaaattagcaacagtggaagcgacgcagtctggtgaagttttatttgcgctagtaggagagctgatctggttatctgcaccaattccgtcatcattatcttggattggtatgagtctcgttattattggaatgatacttcatagttatgtggctgtcgttgtaaaaaaagaagaaaaaataacggcgtaatgagattagctctttttattaagagttagtctttttttcatagaaagggatgaaaatatgaatttacatcgcgttgaacaaattgaaaaagattcaatattaaatgtgctacaatatgccgtcggtccaaatgaaataagcttaaagaaagcagtattattttatcaaagtaataaagggactttgtacaaatatgaagaaaaagcttgtctaggtattgaagtaatcggagcaactaaagcacgagtatgtcatatagcagtggctccagattatcgtcaaaaaggaattgcactgcaaatgattaaagaagtggtaaggatatatcaattgacttatatagaagcagagacagacgatgaggcggtagaattttataaaagaattggttttcaagttaaaagtttaggagaaaaatatccagggatagaaagatttcattgttacatggaaaaatagcatgaaaatatacaattgtacatattgaatatagtttgaaaaaaataataatttcattatataatataggtatctggaaaaatatagataaaagaagatgggtgtataacaagtgagaatggataaaagtaagtttataaaaatagctacttcaataggggtgtcatcttttttattaacaggttgtggtgattatgaagaagaaactgctcagcaagaaagtacagctgttaaaacagatggtgcaaaacaaagaaatgaacaagaaacattaaattgtgatgataaagccccaaccaatgaaaatgtagagaaagatgagttatgcaaggaaaataatccgtcattttcatcttatcatgaaaactctcatttaccgatacttccatttgtagcaggatatttattagcgagtagaacttcaaatatgaattatacagcaaaaccaaatttaatgaagaaaccgtatgcaaataatgttattccatatcgtgaaaaagatgagcgtagaacaggtggcggtagtagcggtggttatactggtggttctaacggtaacaataatacttccaataaagtagatttaaataaacagcagccaaatccatccaataaagtaacaccagatacaaatacgccaaaatcatctactacgcaaacaccgaaagtaaactctggttcaagtggaattggaaacgcaaaagcgccagcaggatcctaaaacgaaagggtaatggagtaatgtatacagaacgagagcaagaagagtatatgaaagtatggttttcacttgcagaagaggctagtaggaatggtttcacttggcctagtctgttagagaatgaagaatggaatcaatatatggcaacagggatgtatcgcatgccagcaaaaacttatactgctatctcaaaagcgacagaagaaatcatgtatgtgttatatagaacgtatcaatatattgtaaatacgacagaagattttcaaaaacttggattcccagctgaagcgtgggaaatggcgagaatgaaacataatggtttattttcatattttacaaggtttgattttatcgtaaatggtgacgatataaaattaatagaagtaaattgtgatacgccaacaggctatttagaaccgtctgtcgcaaatgaagtgttatgccgttatcatgatgtaaatcacccaaaccatatagaagagcatattgtgcaggcatgggaacaaattaaacatgactatcatataggccctgaagagacgatatattttactagttatgattggcacgatgaagatagtcaaacggttcagtttttaagaacgtattgcttaaatcagtcaacggactatgtaggaatacaagacattgtcgttgcggaagatggtatatatacgccaagtggagaaaaaataaaatatttatatagactgtatccaatagagtatttagtaacggacgttgataagaacggaaaaaggattggtttacaatttttagatcatattgcgcaagaaagagtgaaaattattaatccgccagccgcgtttgttatgcaaaacaaaagtgtactcgcactaatttggaagctttatgaagaaagtgttttctttacagaagaagagcaagacattatttataaatactttctaccaacatatttttcaaataagcgatttctagaaagacatgaatcatacgtttcaaaacctgtatttggtcgtgaaggtggcggagtatctatatacgaaaatgatgaattattagctgaagataaaacagagtattactttgaacaaaggaagatataccagcaatacatagaaatgcctgactataccattgacacatgggatggtccatatactggtaaactattaattggctctcactgtataagcggaagagcagcaggcttatttttacgtgtaggtgagaaaataacgggaaacttatcaatgtttactggggttacaattgaaggataaagtaaacaaagagctcatcatttgtgatgagctctttcgtctatgtataaaacagctttttatggttggatgtaaaatcttcactttctttttgtgttttaaatctgaatattataattcaaatattttttgtgtaataatattactattttttatagatgtgaaaaatgattaagttaaaaattaagaaaaatatgataatatatttatataaaagtttaaatttacgtagctagtgggggaaccaatatgaaaatgaatgaaatagtagcaagtacacaatttccaaatacaatcgaaacaataacaaaagatttaaaagcattaggagtcgaaaaaggaatgacaattatcgttcattcatcactaagttctatcgggtggatatctggtggtgcggttgctgtagtagaagcattaatgaaagttgttacggaagaaggaacgataataatgccaacgcaatcttcggatttgtccgatccgaaacattggtcaagaccacctgtaccggaagactggtggcaaattatccgagataacgtcccagcatttgattcacgtataaccccaacaaggggaatgggtgaaatagttgaatgttttcgtacatatccgaatgtagtacgtagtaatcatccgttaggaagttttgctgcatggggaaaacatgcagtagaaataacaatgaaccattcgttatcaatgagctttggagaagaatctccattaagaaaaatatatgatttagacgggtacgtattattaattggtgttggatatgattccaatacgtctgttcatttatccgaggtgcgttctggtgcatgtgagttaatacaagtaggagcacctattatagaaaacggtgaaagagtgtggaaagagttttttgaaatggattacgaatctgagaagtttgtagaaattggtgtggagtttgagcgaaaaggaactgtaaaaaatgggaagatagggaatgcaacgtgtcgtctaatgaaacagcgtgatatagttgactttggaacagaatggtttcgtaagaaaaattagtaagggatggttacaatgaaggggaaaaaggtattaattacgagcggtggttgtctagaaaaatgggatcaagtacgcgggcatacgaatatggccaaaggtacaatcggaaggataatcgcagaagaacttctagctaaaggggcacatgttatatatttacacggttattttgcggagaaaccgagtgatgtacatagagggttagaattacatccatttgaaggaatcgttgatttacaagataaaatgaaaagtatcatatcacatgaaaagattgatgcagtcattatggcagcggctggatcagattggattgtggagaaaatttgtgatcaagatggtaatgttcttaatatgaacggaaaaatttcaagtgatatagcaccgattattcactttcaaaaggctccaaaagtattaaaacaaataaaagaatgggacccagaaacagtacttgttggttttaaacttgaaagtgatttaaatgaagaagaactgtttgaaagagcaaaaaatagaatgaaagaagcaagggcgaatgtaatgattgcgaattcaccacattctttatattcgcgcggagctgtgcattatgtaattggacaggatggtaaagggaagttgtgtaatgggaaagatgaaacagcgaaagaaattgtcaaaagcctagagttattatgtaatcgtgtcactgctttttaaaattaagtttttagatgagaatgaatccgcatagtaataagtaagcgaaactttaattggtgggaattttacttttacacgaatgtgaagcgtataccaatcaagagctatacacagaataattggtgaggagtggattctatggaacatttattaaagcaagctattaaacttagaaacgaaaagaaatatgcgcagtctaaagagatgcttataggattaacaaactttacaaaggatgcagaagtactgtatcagtgtgcgtggatacatgatgtaatggggctagaaacagaagcagttccgtattatgagcaggcaatcgcaaatggacttgatggcgaatcgctttgcggtgcttatattggtttaggaagtacatatcgttgtataggggaatatgaaaaggcaattacagtattagaagctggggtgaaaaaattcccagagaacgctccgatgaaagtatttttatcattagcaaaatataacgtaaacgatcacgaatcagcgatgaaattattacttgaaactgtcgtgaaagtagaggaagtaaaagaatttgaacgtgccatttcattttataaagaccatttaaatgaggtttttaaataaaggagtgaacgtatggaggttacactatcacgaaggcgaaaaggtgtttggattggactcgtatctttaattatgctattaaactatttattgtatgcccttccaattgtaccagttgcgccgaaagaagttgtgcttgggtcattattagattgcatgtttgtcattccaatcatcacgtatttcttcattattcgaaaaagatactcgttaacgtatatagttcctgttgtaatagctggttatatttttgcaagatttattattccaagtgactatttacaagctttttcattcatctcttatattattgttgcggctgaaattgcatttgtaggtctagaattattccttctctataaaattgttagagtgcttcctaaaataataaaaaaatataaagaatatagaagagaaaattattccttttcttatgcaattgatgcagcgtttgacgctactatgaaaagaagtaagttagtagatgccattctaacagagtgtaagttaatctattatgcgtttttatcgtggcgtgaaaaagtaccaacaggtaaatctgtatactcatatcataaaaagactggtgctataggtgtgtatatcatgattattcatgcaacaataattgaaagcattggttttcattatttactacatcagtggaatccagtaatagcatggattttacttattttaaatgtatacgcgatgatttattttatagctgaaatacaagcgatgcgcaaaaatccccttgtcgtaacagaagaacaagtagtcattcaaatcggattaggaaagaaaattgttatgccatttacacaaattgataatattgcgttctacaagggtgaattgctaacggcaaaagaaaggaaacaggtattggatgcaactgttatggagttcataaaagaacctgctacttttgaaataacattaaaagagccagtgaaagcgcagttgttatacggcttttctaaaacagtaagtcgtgtttacttaaatgttgatgaagaacgaaaattttatgatgcggttaaggaaaagttaaaacatgagtaatagtgctgttagttacataaaaacaaatgagcttccgttagaagtgaaaaaatatgaaacatggatagtgaaaaactctttctaaataagaaggagtttttattatatacttttataaaacattatataaaaaactatacacttctttatcactacataaatggatataattgaggatagaactagcataaggggaaacaaaataatgaataagttacttacatcgaaaattgaaattatagaaagaaaaatccggtataactcaacaatagtagatcacaattgcttattacttgaaaagcaatcacaaagtatcgttttatttcacgaggtgcagtattcatttacaatgactgcaaatgatactaagttaacaatcccaaaaggaagttatacaatcgcatattactggaaagatcgtccgtacaatttatacgtatggagagatataaaaggaaagtatttaggttcctattttaatattgtaaaaaacacacaaataaaagatgaagtggtttcctttgaagatttaatcatcgatattatggtacttccaaatggagaatacttcatattggatgaagatgaattaccagaaccattagggaatttcgaaggtggttatgtgaggaaagctctttatggattaaaagaaatcattcaaaaagagctgccaccaatagttttggagacagccagggtgcagaggaaataaaatttaattacataaatattttgaatgggaatgagtagtctcaagttatatgatctaacttttttaataaatctaaggttagtagcatatttcttgaaattactcttttttttgtagaaatttcgtcgcttagttattaaattccatcaaatgcatttagcgtgtgagttttcttattggttacagtggattaaaaatcagaaaaaatagtaagtaaatgatatcgttcaaataaacaacagtaaaaatattcaaacgaatcatatgtatgttttgataaaacctagttgacttatcggaaatatttgtataatatgtacttaattccataacgtattgctgattggagaaaccaaaggcattttatctgttgataaaatgcctttggtttttttattgcacaaatactgaatctgttcatttatatgaatcattttaaggaggagaagaaatgactgtttcaattgatggggtatcaaaatattttttgaaacaaactggtactgttcaagtattagagaatattaattttcaattagagaaaggggattttgttacagtaattggtccgagtgggtgcggaaaaagtacattactaaaaattgttgccggtctagataatgattttgaaggggaagttgttattgacggggagcctatcttaaaaacgagcaagaaacaaggttttatttttcaagaacataggctttttccatggttaacagttgaagaaaatatagcggcagatttatcgttaaaagataagtatgtgaaagataaggtaagagaatgggttgaaatcgttcggttagatggctttgaaaaatcgtatccgaaagaaatttcaggcgggatgtcacaacgtgttgcgatagcgagagcgttattaagagatccaaatgtattattacttgatgaaccttttggagcgctggatgcttttactcgaagtcatttacaagaagtattgctaaatatttgggagcagaagaaaacaacaatgatattcgttacacatgatatagacgaagcgatatatctttcaaaccgaatcatcattatgagtgcaaaaccagggaaaatacataaagtgattgaaaataatttggcttatccgcgaaataaaacttctcaatcgttccaacaacttcgaacgaaagtattacagcagtttgaatatggagggttgattcaaacaagtatataggaaaagggtgattttatatgtataaaaaattaaaaattctttcttttgctttagctatatcagtatgtttgttaggatgtgaaaaaagtacagcaagtagtaagaaagaagatgtaacaatacaaattggtatacaacaaggattaagcccgctattactagcaaagaaaaaggggtggtttgaagaggagtttaaaaaagaaggagttaaagtgaaatggacagagttccaaagtggacctccttattttgaagcaatcgcatcaaaccgattagactttggtgaagtagggaattctccagtcatttcagcgcaagcagcaggtattggatttaccgaaatcgccaatacaagttatgcgagaaaaggaactggaattctcgttcaaaaagatagtaagattgcgagtgtaaaagatttaaaaggtaaaaaaattgcagtagcaaaaggaagtagtgcctttaatttattatatcgagcacttgataaagaaggtattgatgcaaaagatgtaaatgtcattcaattacaaccagatgaagcgcagcctgcattcgaatcaggatcagtagatgcatgggcgatttgggaccctttcatatcattacatacgttaaataaaggtgcgaaggtgattgcagacggtgaaacattaaatgtctcttcaccagaatttttaattacgaggacaaaatttgcgaaagaacatccagaattagttgagaaattcctcaaagtttatgagaaagcacgtgtatggcaagatgctaacttagatgaagcaataaaagtatacacttctgtaaaaaagatagatgcgaagatcgtaaaagaagtgtttaatcacgacaaaccaattttagttccggtaactaaggaaataatagcagaacaacaaaagactgcggattttcaatataagctcggttctataaagaaagaaattaagacggaaaaagttgtagataattctttcgtagaaaaagcattgaaagcgaagtgaaaagaggttttgtaaagtggaaaatacgaaagctgttatgaaaccagcgagtataacgattaagaaaaatggcataaagaaggtacgaaagttaaatgtaaaagttttagtaagggcgattactataccggttattatattaataatttggcagttggctggcgtattcggtcttgtttctaaaacagttttaccaacaccattagatatttttctagctttccaagagcttattaaaacaggagagttattcggacatttaagtattagtgtattcagggctgcggctggtttctttattggtgggggcttaggaatcattttaggaacgattgttggattttcaacgagaagtgagcaatatttagacccatctgtgcaaatgttaagaactgtacctcatttagctgttgcgccgctttttgtattatggttcggttttggtgaaacatcaaaagtgttattaattgcagatggtgcattttttcctttatacgtaaacgcatttttaggtattagaggtgtggattcaaagttatttgatgttgcgagagtgttagagtttagtaaaagaaaattaatcacgaaactaattttaccagctgcattgcctaaccttttactaggagcaaggttatcgttaggtgttgcgtgggtgagtttagtagtagcagaacttatggggtctacagaaggtattggctatatgattatggatgcaaggcaattttcaaatacagatatcgtatttgtcggcataattatatttgcatttgttgggaagttttctgactctctagtacgtttactagaagtgaagtttttaagatggcgagataactttaaaggtgagacagggaattaacatataaattattaggggtaatttatatagaatgtgttagtatacgattcaaaataaataaggggtgtgtaaaggtatggaattattatggtttattccggcttatggagatggtcgatatttaggaacgacaaaacgaggaagagcagctgaatatggttattataagcaagttgctgcggcagctgattatttaggatatacgggtgttttacttccaactggtcaaggatgtgaagacccttgggtgttagcttcagctcttgctgctgaaacagaaaaactaaaatttttagtagcagtgagaccaggactaatgtcccctacagttgcagcgaggatggcatctacatttgatagaatttcacatgggaggctgcttattaatgtagtagctggaggagatccagttgaactacaaggagatggattatatcttgatcatgatgaaagatatgaagcagcggatgaatttttaaaagtttggaaatcgacattgcaaggtgaaacgatctctttagaaggaaaacatattaaagttacagatagtaaagttgtattcccaccagttcaaataccatatcctcctatatatttcggaggatcgtcaactgctggaaaagaagtagcagctgaacatagtgatgtatatttaacgtggggagagccgccagagcaagtgaaagagaaaatagaagaagtaagaaaacttgcagaagagaaggggcgtacagtgcgatttggcattagattacacgtaattgtaagagaaacagaagaagaagcatgggaagaggcagaacgtttaattcaatatgtggataatgaaacaattgagcttgctcaaaagacatttgcaagatatgattcggttggtcaaaaacggatgacccatttaaataaaggtacgagagagtcgttagagataagccctaatttatgggctggaatcggacttgtaagaggtggggcaggtactgcacttgtaggcgatccgcatacagtagcagaaaggataaaagaatatgaatcgttaggaattgatacgtttgttttatcaggatatccgcatttagaagaagcgtatgaagtggcagaattgttattcccattattgaaagacgagaagaaagaagaaaataaaattgttggtgaaatgattgctgatgcatatgcattaaaaaaatagtgagaaataaagtttcacttatttattgcttcattttgtttactgcctgttaacacgagataaaaaacccgcaagttattcgcttgcgggttttcatcgtaaattattagaaaatatggtaaaattaaagggtaacttaaggtgcggttggttgttcaattatcacttctccgagtaggaggggggtgataatacgtgagtgaaatagcgttgctactgcagggtggactgtttctcgttgcattgttaacgttcgtcgtcgttttaatagacaagctcaaaaaataacaacccacctatgcctatagaatgtgggttgttttgtttgtaagaaacaaataggataaatgaacaatccaatctgctaagttacgtggactagtgtgtagccgcacactagttttttttatttatatacaatttataattggtttatgtgattgtattgttcttttcatactcattataacacagtgtcttttcatcaagaaaggagaccgtatgttctggtctctgttatatagtaggtgctttttctttaaacagcccatccatatactgttttaaactttggacataaaatttttgtgtattcacattatttacaccgacaatgggtgatggaaggtcaaatcttttttctgataaatgaacgacaacatcaaaaatgtcaaacaaacgaatgaagcaaaacagaccgtctttatcgctaagtaaaataaagtaatgattttcactacttgtatttagcgtattccataaagaacttttgcttaaatcacgtacaatgcttttttcttttagttccacgaaatctgcatttgagagaatggtagagatatcaatcgcatcttgatcttcaaagtagccatcaactgtttgtacagcgaatgtataagccatttttaatatactcattttatatttacggttatccaatagcaattcacgttgaatagaactggctactttcgttacacgttcctctttccaaatttcattatgtaaggaaatatcgtgctttttacatagtttcataattaatgcattagaataaagaatttcgtcgcttacttcgacaacatcagtctcagcagccgcaagttcctcaccgtgctcatttgtatagagtggggaatcaatttgtcttttcatttgttcaatcttaaattgactcaatttatgcctaattaaaggacgatcaatatttgttgtcatttgttcatgacaagtatcacaaattgagtttgtgaaataatatccacataatatttctggaatgacatattgttcactaagttctttcgtatcttttctgcaaatgatgcattgtgtcatttttatcacctttacctgcaaatttgtatataatctcattgtagtgtatttattggtattttggaatattgtaaaggaaaatattatgtgaaattcatacttattttggtacaatgaagagaagtgctagtttaaaggaggccatttttttgaaatcaaaagtgcacttttggacattagaagtgctaatggttgtaggaatcatatttatttgcacaaaaatatcatttttatttcaaccgattggtatcttcatatcaacattatttttcccaatcttaatcgcgctttttttatacttcatatttaatcctgtattaatctttttggagaataaaaaagtacctagaaatttagcgatattgctgttatatctttttatcataacattaactgcggttggcgttggagtagttgttcctacgatttcacaacagctaatggacttagtaaaaaatatgccaggctacataaaagagggaaaagtatacatacaagaattatcacatcataggttgtttgaatggttatctacacaaaactacgtttccattgaaacaattgaaaaaaatgcgattgaatacttaaaagatataccaaatacaattacgtcgagtgcaacggctttatttggtattatcacgaacgttgcattagttgtatttactgtaccgttcattttattttacatgtttaaagatggacatgcctttccaggaaaagcggtaagtttattaccagagtcttaccgtgaagaggggcttcgtatcattaaggaaacgaacgaaacattatctgcatatattcaagggcaagcgctcgtttgtatatttgtaggtgcgtttacttttatcggttatttaattatcgatttaccgtacgctttcgttttaggaattattgcagcatttacaaacattattcctaacttaggtccatttatcggagcagcaccagctgttattgtaggactgttcgtatctccgatgcaagccttatacgtaattattatcgtaacaattgtacaacagtttgaaagtaatattatttcaccacgtattatgagctcgaaattaaacatccacccattaacaattattatcctaattttaggggtaggtaactttgctggaatcatcggaatgattttagcagtaccagtttatgcagtaacaaaaacagttgtttcaaacttagtgagattgtttaaaacgaagagaagtaatcggaaatagtaaaacctgagaaagatacacctctatttaagtggtgtatcttttgtttataaaaaaataattaaaagcgggttgatatgattttattatatattttttatacatcaaattcagcgatgaacttgtgtgatataagctctataaaactatgtggaatccctctgaactatccaaatcatttccttacgtgctatcatcatcataatcgactcctttcaattctatatagttaaacgattaaaggtgagtgtagtatttgcttctacgatctcgaatttcatcaataacttgtttatattgtctttcttgttttaattcattttgagatattgtttctttttgaatcgtaatcgttaaaaagaataggtgaaacttcatatgtgaattcctcctttcgaattggaattacagatgactacagtaatgactttgtctttcttttacagaatccatagcctgattaatttgtcgctcatgaagcatttcagactcggaaaatttatttttttgaatggtaatggttaaaaagaatactttaaatttcataaaataattgcccctttataagtgatttagaaaaaacgagtgtaataagaaattacaggtgactacagtaatgactttgtctttcttttacagaatccatagcctgattaatttgtcgctcatgaagcatttcagactcggaaaatttatttttttgaatggtaatggttaaaaagaatactttaaatttcataaaataattacccctttataagtgatttagaaaagacgagtgtaataagaagattgaagctcttttacttcgtccataatattttgaatgtgttgttcacgtaaaatctctttctgtgagagcttacgtttttgaatagtgattgttaaaaagaatgctttaaatttcatgaatatattacccctttaaaatatatttttaatacatttgagtgtagtatgaacttttaatgtcagttattttatcagtcagttgttttaactgttgtttacgattgatttcagtttcagataaagtatttttttgaagtacagtcgtaaaaaagaaaatatgaaaagtcataaatgaattcctcctttcgaaaaggaattacaggtgatcacagtaaagtgcttggcgctccttaacatcattcatagctttttcaatttgctcattatgaagaatttcatctttggaaattatatttctttgaatcgtaatacttaaaaacaatacgctaatagtcattgaatgttgctcctttcttagaaaaataatgtaagagactaaaaaatcgcgcaaaaaaaccacaggaagatacagttctcctatggctgggcgtgaaaaagccacaggaaagtatacggcctcctgtggcgaatttatgaattaaatgaaataaagtacgattttcaattctccattagggtggtcgaattcatatttaattgtccagaaaacacaggtgcagttaacgctaaagttaatgcatgtaattgtaatttcatcatttccttcgacctccttttagaatttttttcttacgttagtaagtatatacaattaatggataattgtaaacataaaaaatgaaaatttttaattttgattaaaatgcgtatatttaaaagggatttgaaagtaaatattgtaattaacgaaatatcgataaaaatgggggatgctaaatgaaatatatgcatcataacatgatcgttatgctaacaatttttttattcattgcggcttgttctaatggagaaagaataaaagatatatatgatattaggtcagatgattttaagaaatatactgggacatacgttggtaataattcagatgtggttgcaattgttaatcatttacccggtggtggaacagttcaaagtataagtttagaaaatgaaaatataaaagtgaactatggcgcaaaagaaagtggggctcttacagaagaaatgattgagacgtattggtttgatgagaaggatacgatgaagaagaattttttctttaatgctatatatttagtgattttagtgccaaatgcaaaaagttatgagtttcaggtagagaataaaaactttaagataacgagggaagaaatgttatcaattttgcatagaatattcgatgattttccaaaagaaaaagatatatgggataaaaataaagttataaagttctttaacggcaatgaagaaaaaattaaaatgcttgtggaagataaagattttcggaaatctttatttgctaaatatccagtgagccagttgaaataatggaggggagaagatggagttagtatacaaaatttcttatcatagaatgcaggatcattatttacctaagttagtacaggcaattaggctcgttagtgaagaagatttgtggaaacaagagaccgctgttaattcaattggtggaatcgtactacatatttgtgaacatttacagagaaatacaaggcgttataaggattccaatatagtttttgaaaatggaattgaagaatattttccaataaaacatttaagctccgaaactttgttaaaaactgttgaagaaatatttgatgagtggggaaaagtatatatacaagtatgggaagaaaaaaggcatattgatcttcatagtttattacatttagtggagcatacaagttatcatttagggcaaatagtagatcgtacaaagtcaataaagggacaacaatttaacttttgtcaaaatggtataaatgaaaagaatttgagaacaagagttgaaacttcgaaattttagaaagagagtcattcttaaacgaatgattctcttttttgtaaaagaaatttatggaaaaaaacatttttatgtgatatggttaattacataagtaatgaacctatgaacctaaggtggtgaaagtgtgaaacctactctggagcaaaataaattaatatacttacaaattgcagaaacgattgaatctgatattttaaaagacatattgcttgaagaagaacaagttccatcgacaaatcaatttgcgaagatgttacaaataaatccggctactgcagctaaaggggtgaatgtattagtagatgaggggattttatataaaaagagagggatcggaatgtttgttgcaaagggagcgaaagaagtcgtactaaaaaaaagacaaaatacttttatgactgaatatttacctaaagtgtgggaagaagcgaaagtactagaaatatcaaaaaatgaattgatggatatgattcaaaagattacgaaggaggggaaagagggatgattgcacttgaaacgaaagatgtaacgaaaaaatataaaaagaaaatagctgtaaatgaagtaacgatctcattggaagagcataaaatatatggtttgcttggaaggaacggagcagggaaaacgacactattaaatttacttgcaggtcaaattacttcaagtagtggaagcatatcaatatttggtgaacatgtttttgagaatagtaaagcgatgcaaaatatttgttttgttaaagtgaaagaagctgcatatctaaataataaagttaaagagatttttaatttatgtaacatgttttataaaaactgggatcaaaagtttgctgaagaacttgctaggaaatttcaacttaatttgaaagaaaaatatcataaattatcacacggaatgcaaactgttgtcggaatcattcaaggattagcaagtagagcacctattactatttttgatgaaccaactacaggtttagacgcagcacaccgtgaattattttatagtctactactagaagattacggtgagcatccacgaacaattatattatcaacacatttagtagaagaagtaactcatgttattgaagatgtaatcatcataaaagaaggtgcacttgttgttcaatcatcagtggaagatttattacgacaaggtcatattatttcaggaaaaaaagataaagtggatgagttttcaatcaataaaaaagtaataaatcgagaagtttatggaaataagaggatttctgttatatgggaagaactttctaatgaagattattactctcttgaaaaagaagggttatcaattgatagaattacattacaaaaactatttattcatataactgggggtgaaataaaatgacgatgttaatgaagcagttgaagttacatataaaatatcagtataaagccattcttatcttttggactgtggcattacttataaaagggacaatgactgcaactgatttaaagggaataaaggtagcatttttacatgatattttcaataattcatcaattgtaatcgtaatgtttattgtgataagcgtgtttcttattcaacttgatatttttcctacagtcgtctcgtttggtgtcactaggttgcaatttttgattggttcaatatgttttaatttattgcaatcagcattgttttcatgtcttcaagctttgtttttacaggatacattttataaaacagaacatgtaaatttaggagcatctgcaattgaacaattctttgtacaattcatattttatagtacattagcttgtttattccaatcaacaactattgttcagaaaagatttaattggttcggattggcctttagtataatagttttattcggattggcgagtacaatgtatgcagggataggtataaaagagttggtgtttattaatagtaaaatgttactagaaatacctaatttcatattagtttcaatagttcttatttgcatatatattgtaattagcgctctatttattcgtaaggtttcgtttgaagatacaatttaaatacaattattttaggggagaaggaagagtgaatgggagatacttcttcattaataaccgtttttttatgcattgcactactaatattttggcgtcgttatcgctccatgtataagccaataaagggatcgggaaaacgtattttatggccattactatttttaacaccaggtattgtatggtttttaggtcccgtacatccagctgtactacaagtggctatagcagcatttattgggattcttttctctgtaccacttatagcactaacaaattatgagcgaagagatgatgggaatatttatacgaaaaaaagtgcagcttttttaattacttttattgcacttgtcgttttaagatatggttcaagacaatttatcgttgatttagatcaacaaacgattggtttattattttacgttgttgctgtctcgtatattattccatggagaattgcttgttatataaagtttaggaaagtttggcgggaaaataataatcatgctatatgaaaacttctcatttgagaagtttttttatttttataggtaagcaaaacaagttgttgaagggcaggctgtcatagaatatgatacatattataatgaggaaaagttgaggggataaaaatgcgtacaattttactttttctaaacaacatgtccatcgataaaatagagaacattagacataaacatgatcctttatttggattaattccaccgcatataacaatcgtattcccgtttaagagtaatatttcaaatgatgaattaaaatctcatatttttaatgtatcaaaagggggaggcaaaattgaaattgagtttgcaaatcgtatcattagcgtaggaaactatttgtttttagaagttgatagaggaagaaaacaaatagaagaactacatgataggctgtatacaggacctttattacaatttttgaaagaagacattccgtacatcccgcatgtaacagtcggaagaaaagaaagtgccaaattagctgctgaagtagtgaaggagattcctagttttcatgggaagttaaattgtgtgattgatagaataagcgtggagcgaattggagagaacggggaatcaattattgaatttgaagtgccatttttaaaaagctgacaaaagtcagctttttatttcgtagcatgaagtaatgcaccaattgcaccgctattaccaccatcttgtaaaaagattggtgttttattttgatattcggtgtagctacttataatatgttgaagttgtacgttattacataaagtcgaaccaatataaataatatgtttaatgttttttgtttcagcgaattgaaggcttaatgcagtaacgacttcaccgacaagtccttgtatagtagcaagtatgtctgagctattatatttcgattctgaaatagcggctttaccaaaattgctagcagttaagttattatcgataggggaaagaataccactataaatatctccaaccgtaatatctagttcttttctagatcctacttttgttagagggattacatcttcaaaatgatttgtatttgttaacaattttgaaagtcccataatagtcccaccgccaactccggttccaccagcgcgaatatattgttcattataaacataatggatagaagtacctgtaccgatattggttaaaataaaattgtttatagtgtgtttttcttcttttaatatgtattggacacctgcaagagtagattcaaattcgtttagctctattattttatatgaacctgtaagcagatgctgtaatagtttcgatttaccacccgtaatacatatttgttttatgccattgttgtttttaatccaatctattattttatgttgttcatgtgaataaaatttttcaaaagttaatagctttttttcgttaaaataagctattttcgttaatgtgcctccagcatcgataccgatagtacgttccattttcctgctcctaactacgtaatatgttttcctatttacttaattggttgagaatagatatttccaactgatataaggaacactttaatctgcttgatatattaatagtttttctatagttacaataggctggtcgtttacagttgcaatacctttaccaagaataaaacctcggcgattgcgcgttagctcataatgtaaatcaagtttatcaccgggatatgcttttccgtggaattcaactccatctaaagaggagagaaatcctagtccttcagaatcacttgtatgtacaaatgcactaagctgggcaagtgattctacaattaacatatgaggcatatgtttttgactatcatttataaaccattcgttatttgtaatgagtttatatcctgtaacggattcaccttgttttacatttgttactttatcaatcattaaaaatggataacgatggggaagcgtgtctttaatatgcatatgaaagtacctccaattaataatacccctgctaaagttaagcaggggagtgggaactaatttttaactaattcatctactttttcaaggacgaaaatgccgctatttctaatattttcaacaacttgttgcaatacttctttattttgaacgagtgcaatacgtacgaagccttctccatgaggtccaaatgcatgaccaggtgtaacaacgacattcgcacgatccattaatgcataagcgaagtctagagaagtccatccttgtggaatttcagcccagacaaacatactaccagctggcttatcgacattccagccaaatgctcggaatccatcgactaaagtatctctccgttcttgataaatatcgcggtttttctcacaaaatgcagcgccatttcttagtgctacagatgccgctttttgaattggtaaaaatacaccgtaatcggtattagatttaaattgagtaagtgcacgaacaatttcttcgtttccaatcatatatccaatacggctacctgctaaactataactttttgacaaagaattgatttctacaccaacttctttagcaccaggtacagagagaaagctaattggcttattaccatcgaaataaaattcagcataagcaaaatcatggacaacgataatattatgctttttcgcgaatgcgattacttctttaaagaaatcttcatgagccattgctggaacgggattccctgggaagtttaaaatcatcatctttgcttgatcggcaatttcttcagggatgacttctaagtctggtaagaaatcattctctttctttaaaggcatgtagtaagatgttgcaccagccatttgaatacctgtttcataagctgtatatcctggatcaggaactaatataatatcacctggatttgcataaaccataggtaaatgaacgagcccgtcttgtgaacccattaacaataaaacttctttatccgcatttaataaaacgttatgagtgttgttgtaatattcagttacagcttcgtgaaattcttgaatacctgataatgtatacccgtagctctctttctcactcgctgtatgtaccattgtttctcttacaaaatcagcgggcggcatatcaggatttccgatgctcaaatcaatcatgttatgacctgctgcaattttttcttttttataggctcctaattcactaaatatagaagattggaatgctttcattctagttgctaacgtgtaagtcatcaaaacccctcctaaaacagtgctttcattcttcatttttaattattctgaaaacacatgtttatattttatcatttttttatgaaaattaaaacgattgacaaatttagaggaaggattagcctattttgaaaagtaacgatgtaaatagcgtagatgtgttaattgaaatgtctattataggattcattttatataacttaagatattttctagtttttattaagtatatttctcatgttttgaatgaaaaagaatacgaaaacaagggctatttttgtggacgatttctaaagtgaaataacgcagaaaatattttctgcgtctcctctgaaatgtaatcatttctttttatatgtgcataatttttcggctgtcaaaaagtatacatttaatgtaccgtcggcaacttttaaagtttggtccgatgtaaatgaattaccataatcaatgtgatatatattagaatttttgacaaatgagcctttatataaatcgtctttattctttgttgtttgcatttctactaaattttgcacaatttcctctttattttcttttttgataactgtttcaaatttataatatacagggcattccccttttttattgtcaacgacttcccaagaaccgtatatatcgttattgctgcatccactaagtaggatgattagtataggaattgtaagtagaacctttttcattttgtgctcctttcttttaaattttaataaacgtgcgaatacgatagggatattataataaataaagtttaaatttttttaaagaattatttaatttcatataaaaatttaggagaaattaaataagcatgaatctagtgtaaagtcagattcatgctagtactatagcctatgttatgtcttttttgaggataaataaagaggaaagcagaatcactattccatttaatatatatacgcttgcggtcataaaggctaacgtacctgcgccaaatcctgctttatcgaatatagaagcaaatgttgcgatagtcaaaaagataatgggagtcagtagtaaaaatatgaaacctgccacgattctttttttaaaactatgtccagataaggaaatggctaaaaagtttaggatgctaaacagagcaattgcaaagagcaggacaataaatacttcgatgccatcagacattttaccactccttttataaagagtactttttataatctattcgaaataaaagggggatactcctttaggtaatttcaataaacgtaataaataggcgtattataaaacaaagaagtatggattcaatattagacccatacttctttgtttattttataaatttgcagattgcgaatgctgtttttcataatgtttctgcttagaaagggaaatagaaataatcaataatgaaacgactccaaagatgagaaccatatattgtaacccaattgtatctaagaagaaacctgtgccaagtaagacgatttggaacataaccctctcaaacatattacggaatgagaagaggcgaccgtgataacttttttccactttcgtttggaaaatcgtcgacataatagggaagaagcagccaacactaaacccaaacaaaccaaatgatgtaagagccatccattttatatcgctaaagaacaatgacagatgtgcaaaagcagtacaaactgcgaagaaatatagtaatttttcaggtttgaaatgatcagatagacgtttaattacgaaggcacctaacataaatgcgacaccttcaattgtatatatgaaccctttaatcgtaggatcatgttgcatttcgctaatgttaataaccattaaattaaacccagctataaataatagagggatgatacttaatataagtgctgtaaaagcaataggaattccttttaaaatacgaaatacttccataaagctattatcttttgcagcttgtttacttggtgttgttgattttttgtcttcgaattgtaggaagaaagtcgagaggaataataaggcgtatgctgccattgagaaggcatacatgtactgtaaactcatcacaactaaaagaattccacctagtgaagtgcctgcaatacgagcaattgtaccaacattcatatgtacaccgttcatttgtaataactcatgctcacgtacgatgagtggaattacagattgtaatgcagggaaataaaatgctgctgaaatttgaagagcaaccataaatgcgatcataaatgcgatactttcaaattgaatagcaaaaaacatgaaaataacacttaaaactcgaccaaacccagcgtaaagaagaacttttttcttttcatactgatcgatgacacggccagccataggtccaactagaacaccggctaatagtccgataaataatataactgatttcatgaaatcagaagggacatatttttgcataaattcaaggttgccaagaataccaagccataatcctagacctgcaataaactccccaattagaacaatccaaacgtttttattacgccacataacataaaacctctccgtcttttaaaatgaaaaactcgtatataaaacctccttatttatgcattattttcatacgaacttttttagagtcagagtctatattacgtgtttcataattggatttcaatctttttgatttgtcaaaaatttgatgtgttaattgatgtaataagtgaatcaaaacgtaaaaaatttatgattaaagctaatagaaagtaaggatacatataaaaaagcaagaacgtataactacgcctcgcttttctcaagtacaaaattaaatattagattcacttagcaacatttacgctcttgtccaatagctaaagcgctaaaagatagtgggccaacaacttctgcacttgcaccactagtaaggttttctacggttaatgaatattcgtgtgttccactgctaacgttttgatctatagcttgaaatgtttgtacgtagaattgttcagaacctgttgattcaatacctacttgtgtattgaaaagttcaatattatcacgaaaaattcgaaataaaacttgggaaatctcagttataccttctacaccaactgtagcgattaattctactcgattatttcgtgaatctctacttgaaattctcaattttaaatttgctaaaattgctttatttggagaagctgggattgcaaaagttgtttcaccagttttacttataggctgagtagcttggtaatcaatgatatgagtcatattcttcacctcctcatatactagaatatgaaaatagtgaagaattagcttggacaaatactggattatttaatagagtcaacaataattattgaaaagaagaaattcacataaaagcattaagaatatatcacaataagatgatatttttcttaatgctttttgtaattaagcagaatattcttctttacgtacttcaaaaaattcattacgtcgtaagtaattataaattttctctgaaacctcttcttcttcagacactaagaaacgatgatcaaaagcgtagaaagattgacctttaattaattttacgtaatacatattaaatgcctcctgacactaaattattacttgcttcatattatgatggcctatatgtctgctaaaaatacttggagtttcaaaggggataagtaaagggataaaagagcttacaattctgtaaggtttatgtcacctttttcgatagtttgtatttaccaatttcttctataatgcaaataggttacataaaataagggggtaaaaagatggatgaaatacttggagaagttgtagctggtatttgtgaatttgtagtggaagtaacagcggatgctataggaaatttagtttctggaaatgatgaggaaaaagaaacattataataatttgtaaaagaataaagttgatcaaattataaaggctgatttctaaagggaaatcagcttttttattttttacattatattaacttaatttgaatattcatttgttatcatatttaagaagcctatataaggaggtgaataaacaaatatgtcgaattcagggcctgatttatctgtttctcgtttgattgtggtaaatatagaagaaaaagaatatcattttattgttcgtgaacatccgattgtagggaaatttatatcgctatttgaaaatgggaaagaatacggtttaatagataaacaaatcgctaataaagataaatttattacatcggagcttactaagttagattattttaatatagatgttttatatcttacacctgggtggatatggattggtatggatcaatttggtttacatgctcgtgaggctacttataacgaagtagatgttattatgaagttgaaagaggatttatattatatagatatatacgaagaaataaaaatgtagtaaatatttattcaggttaggggggaagttcccatagccttttttttgtttaataataaaatgcaaaattatattattttaatgaaaggtaaatatgataagaagtgagatgaaaagaggatttgaaaatacattaagagaattgtaataattatatgagtcgtatatgtaaataacaatagaaagaagatgataatatgagtaaagaagagcttgtgaaaaaacagtttggcagcaatgcagataaatatataaatagtaaaatacatgctaaaggactggatttacaatatgtagttcaacaagttgagtctcgtcataataatcgtcttcttgatgttgctactggtggcgggcatgtggcaaatatgttagcacctatgtttgaagaagtagttgcacttgatttaacagaacagatgttagaaaaagcaaaagtttttataaagcagaatggtcatgaaaatgtatcttttgtagcaggaaatgcagagaatttaccatttgcagaccatttttttgatacaattacatgccggattgcagcccatcattttacgagtccggctcaatttatttatgaagtaaatcgtacgttggagaataatggattattcatcttaatagataatgtttcgccagaaaataatgaatatgatacattttataattttatagaaaaaaagcgtgacccaagtcatgaacgagctctaaaaaagacagaatggcttactttattagaaaaaaacggtttgcaaatgcagtcatgtcttacttttgataagaagtttgattttgactggtggtgtaatatgatggatgtccctttacaaaagcgtgaaaaattaacagaatgtatgatgaaagcaccaaacgaaatgaagggatattttaatattcaatttaaaaataataaagtagaatcgttctatactgaaatggctatgtttatatgtaaaaaaagtacaacgttaaaaagataaagataaatgtgttgcagtctttctgaagtacgatatacttagtacagagaaactgagaattgaggaatagttataatgattcgtgtacgcattgaaggtactgaggaagaaatgcttgaatttatggggaaaatgccagacattcctggatttgaaaagacacatatgagagagccgagaaaaggaaataacccgaaatacgattcaagtaaaaatgtacttgcatatttgtcttataaaaagattgaagtcgccaataaataggcggctcttttagtttgcgctgtttcaccgccttgtctttttcacataataataatagtagattatgctcaagaggggtgagaatagttaataagaaaattatcttttttggagactttggtattgatgacgccgtagcgttaatttatgcaaataaaacatgtaaattagatattttaggtattgttgctgagtatgggaatgtatcacgagatatcgttacggaaaatgtttattttttagaaaggtattatgctacacaagtgaaaattattgaaggtgcgagtagaccgatgacagctgaagagcctttgtttttccctgaaatccacggggatcacggtttaggtcctattattccacctgagatgagaatttgtaaacgagaaaatttttgtgaattaatcaaattaatcgaaccttgtccagaagatattataattgtggcgacagggagactaacgacgcttgctacgttatttttattgtatccaaatataatggatcgtatttgttcgtattatataatgggcggcgctttcctatttccaggtaatgttacaccagtatctgaagcgaatttttatggtgatccaattgcagtaaatattgttatgaaatatgcgaaaaacgctagcatatacccgttaaatgtaacacagggcgcgcttataacacctgaaatggccaatataatagataaacaaggaactggacaggcgaaactcattaaaccaatgattgatttttattatgagaacttttataaaaaagaatatccgggtattggtgggagtcctatacacgatttattaccgtttatctcgtttataaatgacagtattttcgaatataaaaaatcggcagtgtggattagtacgacaaatgatgtgactaggggccaaagtgtagcagactttagaaaaatagctgagccaacaaggtttgatgatcggccgattcaaagaattgctgttggttttaactatgcagcttttaaagaagagtttatgcgaacaatattgaagccagattgtccttaatgtgtgtaataacaagtcggataaatcgttagttcaaaaaaaggtttaatctgtgtgtattattctcaaaaatcttaaagttgaacaacatgaataacttatgaaaaatgtcacataactaatggtaagcaattgtttctaattatattttgattggtgaaatgtaaaggaggttattatatgatttggtctttaatcgtcggtggtatattagggtggcttgcgagcttaattactggaaaggacgtacctggtggtgtaataggtaatattattgctggtattatcggttcttgggttggttcgaaattacttggtagttttggtccagtcattggcggatatgcaattattccagctttaatcggtgcgatcattttaattttcatcgtaagcttcttattacgagcaatgcgaaaatgaatgtaaggactgtttacatttgtaagcagtcctttttatatgttatgctagtattatacaatcaggaggtgtcagcattgaaaacattcacagtaaatttccatcaagaagataatgctaaagcgacaacagtacataaattaagtgaagaggactttaacaaagcaacagaaaaaggcactcgtcatctatttgatttagatacaaacgttggattcttcgtattctttgacgcagaagatgcagaaggaaacgatcaatacttaatgttacaatacgaaggtgatcatgaagagccaactgcgtgctacggatttgatttaaaactatactatcaatttttagcactgtacttaaacgatcttgagttccaaggtgaaacagatgaggaagaggaagaatacggtccaattcatcatttagcgcatttactttatcatattgttgaagatggtaaatcaatcgaagtgtaatatacatatttgaagctgccctttttgggcagcttttttatatgacattggaatggtgtactgtgagctaaataaagtgaaactttaatcagtggggggtgttcatccccactgattatcagccctcaccaatcgggcttttacggacagtagggcccccacctaacttctttgtttccgctgaattttgaggtggggatcttactgcccggcaaatagcgggataaattaataatagaaatttatttattactttcatgttagcatcgtaaaacacctgttataatgattgtaattaaattcatggaggctaattctatgcttgtagatgtaaaagcttttattaaagctgcaggtttaacatgtatttcattattaagtggagataacacgtttgcttataattttgaaactgtaaaaaatactatcgctacattttttaagaagctaagatttaccgtataattttatttcaatcagtaggaaaagagtaatcacttcctactgttttttttctgtttcaaggagctgttgtgagagcatgttttaagttatagatagaggatattatcattgagaagagaaggtttaaataaggagatgaaaatggtttcgtttatcaagaggtagttacttcggatataacagacttggttactttttagaaacagcttttgtaatatgttttgtacaagcttttggagagagtgaagcactgactttttggaacaaacataatttgaaaagtaatgtaatgggttggttaacgaaatgaataagatgcaatagggggtaaaaatgatgaaaatatatttaaaaatagttatgttatttttggtgtttacatgtatgtttgcgctagtcgcatgtaaagggacagacgaaaaaaaggaaacaaatccaacctcggaaaataataaaaatgaacaaagtaatttttcagaagaacagaaaaatcctgaagcaaaaccaagcaatgaaaaaacaacaaaaccatcgcctgacccagattcgaaaaatagaacacttaatcaaaaatcaattaaccacgttaaagatttgtttgaactcgcaaaagaaggaaaagtacctaatgtaccatttggagcccatacaggggatattgaagaaattgaaaaagcgtgggggaaagcaaataaaaccgaatatgcagggaacggaatgtacgcaacttttacaaataaaaatattgttttcggatttaataaagggtcacaagtttttgatgtacgctcatatcatgcagaactaaaattgattacattacaagaaattgaaaaagcattaggaaaaccatcttcagttaaagagaatggtgaagataaaatatatgtatacaaagtaaataaccagtatgagctgaaatttgtcattccaaaatcgactggtaaggtagatcatatttctgtattttcaccagaggatagtattaataaaatggcaggataagaaattaagtgatttcaaaaacacctcactttccttaagtgaggtgtttttagttgtaaataaggaacgtctcctgccatataaaacatactttcatacgcgaaatacttcacttttgttttttaatattcatccaataagaaatattgatctactgaaaaagtagtaacctataaattatgtgtaggctggttcatgatttttttacgttctaaattttgaacaaacagtgcttgaacaatacctccaattaataagaaactagcacaaatataaaacagcatacttccatttaacttacttaataaaactgcacccataactggtccgcacgttcgagatatatcccagtgtataccgtaaattgaaaaatataaaccacgtttattgtgaggtgcaatttctgaaacgaatcgtaataagtggtttagagcaatactttctccaatgactaaaaagagtaaggtgaagaataacgacaatatcgtcgttgaagaactaaagccaactgcagctattgtatagcaggcgtaagaaataaggatgattttcgccatagaaaatcgttcagaccattttacgaggaagatttgtagtatgatttccaaaatggctttgcatgttgaaataaatgcgagtatgaataagagattaggaaatacatgttctgcaaaaatacgataattcgtctcagtttgtgcataaaaaaagctaataggaagtgtagaaaccataagaccgaatatggcataatgtttaaaaataaattgctttggtgaacttgcctcaactgtttgtttcgacttactcataggtggaacggtttctgggagctgggtccaaacaacaacggcatatatcgtaagggttacactttgcacgataaataaatattctgggtgagtattataaaaacatgcaccgattaaagggccgattacggatccaattgctcccatcgtttgtaggagagcaaaaatttctgcttgctgctcttgttttgttaaatcagcaatttgtgcacgctgagctggaatgtataaggaacggccaataccattaatgacatataacagtgcaaatataaaaacagattgagcgaaaacgaaactgccgattgcaacaccttgtagtaataatccgagtaacataatcttttttcggccatatttatcagtaattcctccagcaataagtgtaaataaaatgtctgaaagtggctgtaatccgaaaattagcatagttattattacattgccgtttaacattttattgacgtaaataatcataatgagagctaacatagattcagtcgttcgggttaataattcaccacacaatctaataaaaataggtttattgtaacgaagtaagagataattcaatattaattcctcctttctatattgaaatgataagatgaaaggagagttggaaaaagggtagagactatagggaggatttttcaccttttagggggagtatgatgtttattttagatcaatacattgaactatggattgcttatggaaaaggaaaaaaagagggagaacgattggaagtaacagtgcaaaatatatctggtacattattttgtacagagcgcaatagtaaattaattataaaaaaattagatgagttaaattggatcaagtggtttccaggtcgcggcagaggaaatcggtctaagttaatatttcaaaagcacccgatgtctttaattttagatagaggaaaagaaataatgaaaaaaggggatgtgaaaagcggaagtatatttgtggaacgctatagctcacattttccatcagtaaagggagaatatcattcctgggtggattcaatatttggtcataaggttgaaatgacatctgaagggagaagagatgtactccggttgcaagtacaaatgaatttagatatcacattagatcctgtatacgctacaatgcgctcagaatgccatatggtaaaacatatattcgacacactcgtgtatgtagacggtaatacaaacattatagagccaagacttgcatttcactgggaatataatgacgctgaaaaaatatggacgttttacttacgaaaaggagttcactttcataatggaaaacaacttactgcacatgatgttatatactcgttgaatagatttataaagctggaaaataatgcacacgcatggatgttacaacacgttgaaagtatccgttcagtggatgactacgttttcgaaattcaattacatacagaaaatcgaatgtttttacatatgctaagtgcagaacagtgttctatcgtgaatgaagatgaagcaggagggctaattggaaccgggccttttcaattatataaaagtaatgaaaatctgttcattttagaaggacatcctttatattttcgtgaaagaccttttttagatcgtgttgagttgtggaatgtagaacaaggtgtaggtacatacgatgttttagtaaaggcgcagtataaagataaagaaaaacataataaagaattgtctcggcttgagtcgaacgtgacatatataacatgtaatcttacgaaagaaggaccaatgcaagatgagttatttcggaaagcgttatataacatcattcatggttatacaatcgttcaagaactcggcagagaacgtggagaagtggcaaaaaaactaatattagcaggtgaaagcattgtagagattgaggaagatgtagaaagtttaattaaaaggagtacttatcataatgaagtgctacaactctacacatttacaggacgagatcatgttgaagatgcacagtggatacaaaaagagtgtgcgaaatatgggattcgtgtagaaaataattttcttgatatagaagagctattggaagtaagtacgatacaaaaggccgatatgatgcatgatagtgccacaatcagtgaacgaatagaagatagtctattatatatgtttcttacaaaaaatagttttattcatggacaaagcagcatggactttcatgaaaagttgtctccttattttagacaagaagaattagagaaaagagttgcactgttacgcgatatcgaggatactttgttacgtcaaattcatattattcctttatatcgtaataaacaagaggtaagtacacatgaaaaagttcaaaatataatgattaattcacaaggttggattgatttttataatatttggtttaagtcttgatatataagggcttttgcacattttcataaggtgtgtaagagccttttttgtatgtaggaataggtttgttttacacattgttacgctacttgtgataaaagtctatttacagcgtaacagtgttatgttacattgttatcaggaaggagtgttatagagttgagtacagatttaatttcaaaaaaagatttattagaactaactggtatttcatacggacagttatataggtggaaaagaaaaaatttaattccggaagattggtttgtacgaaaatcaacgtttacaggtcaagagacattttttccgaaagaaaagatattagagcgtatcgataaaatccaaacgatgaaagaggatttatcacttgatgaactagcgaacatgttttcgccgagtgtgagagaaattcttttaacaaaggaagacattttatgcaaggggattgcatcagaaccagttttacaatttttcatagaacaaacgaataaaagagcagagtttcaatttgtagatattctttatgtgtacatgttagaagaattactgcaatcaggagagattagtttagaagaaggaaaaatggtcttgcaagttttacgtgaaaattatgaagcaattaaacataaaacttgtgacttaattattgtccgaaagttagggatttctacatgtttattagtctcaaacgtggacgatttaatttttgaaaaaggcaccaaaatcgttttacgcgaagcgattatgaaatataccgaagcattaaaaactaaattgttgtagtggaggagaaagtatgcgtacagataatttgattataaatggttacggttcatcgaatggtggcgagtttcataaagtgcaattaaacggaaaaggaactgtgaatggaaatgttgaatgtgagcaatttgaatgtaacggttacggtgcagttactggcgatttgaaaagtagcagtgcacgaattagcggatctggtaaagttgatggcacagttcaagctgaaacgatgcgaattgatggaaaagcaacaattacgcaaaatgtaaaagcaaacagtttgaaaattgcaggaaaaggtacgataggtggaaatgtcactggtgaagaatttaaagtcaatggtcaagctacaattgacggtaattgtgaagtggatactttttcttcagaaggacaatttacaatcggtggtttattaagcgcagatgaaattaatataaatattcacggtacatgtcgagcgaaagaaattggtggtcaaacgattaaagtaagacatagatcaggtacatttagtagactatttaaaacagtgtttggcttgcagttagaagctgaactattagaaggtgacaatatcgatattgattatgctcacataagaacggtaagaggaaacaatgttacagtaggagcaaactgtgagattgaactgattgaatataccggtgttcttactgttgataaaaatgcaaatgtaaaagaaattaagcaggtttaacggaagggagaaatcagtatggaacatccacatagtctcacagtaaatggttctggtaattcagcaggcggagattataataaagtgaagattcgcggtgaaggaacaattacgaatgatatgagttgcaatgagtttaaaacgtacggaacgagtgatgtacgcggtaatgtgaaagtgaaaaactatgtcgtgtatggagataacgaagtacaaggaaatgtagatgcggaatatgtaaaagtatatggtaatacacaaattcatggtgatgctcatattgaaaaaacaaaagttagaggtatgatagatattgaaggaaagttttcaggtgatttcgtagatgtaaaaggtgctttaaatgtaaagggagatattgaagtagaagatttatcattaactggtggtcttgaaagtgatggattacttaatgctgaaaatattcaaatctcacttcgttatgaaggcagtaaggtaagagaaattggtggtaaaaaaattaccgttcgtaaaaaagcgagatttattccttttactagtcatgctggaaacctccaaacttcaattgttgaaggagatgatatctatttagaacatacgattgctgaagttgtaagaggcaacaacgtcacaattggtcctggatgtgaaattagtgttgtagaatatcatactagttttaatcaaaaaggtaatgcagtcgtaaaagaacataaacaaatataagtagtatgagggagagcaagagatatggttgagaagaataataagctcggctttgttgtggcgggcttattgctaggtattttaatggcatcgatggataataccattgtcgtaacggcgatgggaacaatcgttggtgacttaggaggcctcgaaaactttgtatgggtcgtttctgcctatatggtcgcagaaatggcaggcatgcctattttcggtaagctatcagatatgtatggtagaaagagattctttattttcggtttaattgtctttatgattggttcggcactttgtggtactgctgaaaatattacacagttaggtatttatcgtgccattcaaggtattggcggcggggcattagtgccgatcgcgtttactatcgtttttgatatttttccacctgaaaaacgcgggaaaatgggtggtttattcggagctgtatttggattatctagtattttcgggccattacttggcgcatatattaccgattatattagctggcactgggtattttatattaacttaccacttggcattttagcacttatttttattacattcttttataaagaatcacgcgttcatagaaagcaaaagattgattggtttggcgcaattactttagttggtgcagtagtttctttaatgtttgcgcttgaactaggcggacaaaaatatgattgggattctagctttattttaagtttatttggtggattcgctattttaatcatcgcattcatttttattgaacgaaaagtagaagaaccaattatttcatttgagatgtttaagcagcgcttattcggaatgagtacaattattgcattatgttacggtgctgcatttatgtcagcaactgtttacattccgttattcattcaaggtgtatacggcgggactgcaacaaactcaggattattacttttacctatgatgctaggatcagtcgtaacagcgcagttaggtggatttttaacgactaagctgagctaccgaaacattatgattatttctgctgttattatgttaatcggattattcttattaagtacattaacgccagaaacaagtcgtgcattattaacggtttatatgattattatcggatttggagtaggtttctcattctctgtactaagtatggcttcaattcataacttcggtatggaacagcgtggatctgcgacttcaacgagtaacttcattcgttcattaggaatgacactaggtattacaatcttcggaatgatccaaagaacaggtttccaagatcaattagaagaagcatttaaagggatgagcgggggaatgaatacaaaattaggggattcaagagccattttatcagaatcggcaagatctcaaatccctccgcaaatattagataagattattgacgctctttctagttcaattgttcaaacattcatgtgggcattggtaccagctggattagcattcatattcattttctttatgggaaatgagcgtatggtaattaagaaagaacaaatgaataaaaagagtgaaacatcaaaagcgtaatgaaaaatctcctttccaattggaaaggagatttttcgtatgtacggtgttagattagccttcgataatttcgtattcttcgtctgcaagtaataaaatttgcgttttcttgcctttgttttgaacttcgattacatcgtatgcgcctaagtctcttactttgctttgagaagcgttaaccataacttcaatagaatcaattaagatatcttcttcaatatatgattcaggcaatgccatatcttcagtatctaatacacacgcatatagattttgtaaattttcagtagttgggttttgttcctcaacatcaatgatattttttactgcatccatattttcttcttttgcttggtacactttaattttagccataattttaatctcctttataacgtaatcgtagaggctacacctcattataacgttttttttatgaaagatgaaattgttatatgtatttatagtaaaaattatgtgtccttactcaaaattggtgtgatttccatataaatgtacgagtaggtaacgataatgttacgttaaagttatattgtccaagcttttcttattttcttcctatatatatgtagtagcaattctatatagagaagggatggagtgtaagtgggttgtgaaccgagagtttctagagattttgttcaagtacctgaactggtaggttttcgattacttttatcacatccagctggagaccctttaaactacggattattatttattaattttcctgatacgatttttatttttatattggcatcaagcggataccttgccatttcgaactgtttaaaaatagagggcggaactggtgatgccgaaatagaagagatgaaaaaatgatagaggatgacgataatacgtacaagtcagttgttaaattgactaaagtatataagaacggtgagacggaatcttttatttataaaaatgagttataatacatgtatttaaatgaaccctcaaactattgttgagggttgttacataattaattatgttgatcctttaagccatttgttaacgagtaagaaatatatttattgttgacttattttataggttgatcatttcatagttagtagatgttataatcattttatgtttactgatattttataaatattcgaagtttcaatttaatagtcaattgcttttatgatgaacaggtgggtgtgtatatgaatacgaattatggagcgctcatgaaaatgttaagagtggttgattctaaagaaggcgggaatgtaaatgatatatgaagcgaatatacatacaagaaaaaaactagtttctatgtttgaggatttcaataacgttgttttactttcttatttacaagggcatatgggtactgcttgggtaaatgatcttgaaaatccaacagtagcacaagttatggtaggaatttttacattttacgctggagacccaaatacgaaagaaacagaagagttattacgtaatattccagaaagaattttagttatcgtaaatagtgaagagtggaaacaacgcttagaaacattccatgaaagaaaaatagataagtttttacgttataaattcaaacgaaatccagaagtttttaatcgttcaaaattacaatcttttatatcagcacttccaaaagaatatgagttaagaagaatagatgagcatatcgcaaatagccccaaattacataagatatctgaagattttacaagtcaatttcattcgatagaagattatataaaccgtggtataggttatagcattttatataatggagaagttgtatgcggtgcatcctcctatagtatttataatgatgggattgaaattgaagttgcgactgatcacaatcatagaagagagggcttggcaactgtagttagtgcagctattatattggattgcttagaaaatggaaagtatccaaactgggacgcagcgaatactacatctgctaaactagcagaaaagttaggatatgaatttgataaggcatatgatacttattttgtagataatagatgagtgaaggagttacatactaaaaaatacatgcgccctagtacgtaagtctagggcgcatgtattagttggtaaatatcttcataacaattttatcacattttatcttttgaatgtttggaattaaagatatttatgtgactttttgaaaaaataaaagagcagttagcaaaagctaactgctcttctccaagggggaatggagaaatacaatcatgttacctatagtattgacagaacattgagttttaatcagccatttataaaaggagagataaaatatctttgattaatctttagctcccattaggagtactgatagaaaaacgattgagaatatatttttttattacatttacaatttgaagagtagaacgtgtttatcgtaattctccaaacaccaattatatttttttagaatgattggatggactgcttctttcgtagtatcgacttcagtatatccatatttcttataaaagttttctaattcctcaaaaggaagacaatatacattttgtatttgtgatttttttgcagtttctactaaaaatgaaacaagctcaccagctaattgtagccctctaaattgaggcagaataaaaattccgcccatttctaaagtatcttcatctatttggactaatcggccaacgcctgcatactcgttgttatatgtaataattgcaactttatctctctttaaatcactccgtacaaatcctattgagtcatattgattattaacccattctaaatcgttagatgtagccaattgaatactcatatacatcctccttggaaatactagcgctctcttcattatatagaacataagatactatatcaaaagaaccttgagatagcacatttgtttaagttattagttaaaagtgtgggattgctggcattgaaatgatggcttcaccaaacataggataataatcttgtgaatttagtgttacatagtcaaaataaaaattagtttatgtgttcggtaacgcaagattgtttaagtgtagagaaaatcatagggttattttaattagtagctactgtattcattgaagctattaaggaaacgtggtaatcgccagccctagtgatacaaatcatattaggatttagtaaaaaaaattcttcctgaaaaagagggggattaaagataagagcacttcgaaaagtgcccttcagtaacgactacttattctaaaaagaaaggatgcaatatatcatatgaagtttagtgtatttaagtatgggtcttttatataaatgtgaaataaaagagggttgtcttcttattagaaggcagctttttgttattacaaaaaagaattagaaataaaatataaattcagttacttgtccaaacaatttttttgaaaatacataaaatgctagtagttagccaatatttttatattgttaattttttagactaaaaggggtgattttatgtgtgattgtgaagtttgtagaagaaagaaaaaacgtgatccattaaatcggggttctgaaccaaaaaaacaggattccgaatcagtaaattcttattcatttagtaaaaatgcaaattttttagaagaagctatacaaacagatgaaatcgatcaagtttctgaggaatatattgaaatagtagattcagcagatgtacaagttactactacagatacaaaagctgcactatctatccaagccgcgttacaagcagctattgtggttgtagtaagtatttctatagcagatagtgaaaaggcagataaaataacacaagaattgtttcaaaaatcatctattaaacaaattaatagacaaaaaacatttattaaaaattccagaaacgtaaccgtaacaactactgatacagatattgcagtgaatattcaaattcttcttcaaattttattagcgttattagttaaactaaacattttataaagtgtctatcctatttatatttagctataagggttcactctaagtaaatattttttgttgtaatatgtggtacaagcttggactttctcattatgactgaattaatattcaaaattgatgggaaattaagtgtggaaaactacacaataacaaaggtgaacctattatttaacagtgaataaaacttatatatgtgaagtaaaggaaagctgtcttcgtattagaagacagctttttgattttattagtaaaaagccgtgaaaataaaagattaagttacttgtccaagcattttttatttaaatacatataatgctggtagttaatctaaatttttatagaaaactgataggagtgaatattgtaaatggatgatttaaataaattttcttcctttaagtttgataaggatcaaaagaatataattatagaccttttactctcagatatttttaataggcatgggataaatgaagaaaaactaaaaaatttatcaccagaaaaaaagcagcaaattaaaagtattgtttctgaaatacaatcacaagttaataattatttagattgaaagggggtgaatgtatgaaaaaaacatgtcattcagaggaaaataaaaggtggagtgcattagactcctcaaatcctcatccatcttttaaaaatgctactgtttcagaagctgcagcacaagaaagtaaaacttaccaaatttctgaagaatctattacaattgtagattcagcagatgtagaagttacgactacagatacaaaagctgcgttatctattcaagctgcattacaagcagctatcgtggttataataagtatttctatagcagatagtgaaaaagctgaccgtgtagcacaagaattgtttcaaaaatcatctattaaacaaattaataaacaagaaactgttattagaaattctagaaatgttacagttacgactacagatacagacatagcagtaaatgttcaaattcttctccaaattttattagctttactagtaaaattaaatattttataaaatgtttaaccttctttagatatagtgcatcttacaggtaaatattcactgttttaattatagtacaggctataaatatttatcataactggattaatattcaacatcaccaaagtatgaatgtaaacaaacaatgtgatggaaaataaagtttggttattttatgaaaattgaaaagccatttcctttattggatttggcttttcaattttaaacagtatgaatttgaaaagataatattaagctaaagaagtaaaatatactgatacaaaatacttataaaattactcgtgttatagaaaaataataagaaaaaggtgtttaaaatagaatcattttcattaatagttcaagttttgaagaatagtgcatacaatataaagtgttttcctttcttcatttaagttttacgtatataatttaaaagtactatttttattttattattttatatttataacagaatagaggtttaaaaatgagtgttaaaatcattacggatagtgcggcggatttaccagtagaattgctgcaagcatatgatattgatttaattccactccgtgtatatgatgaagcagaaacagagtatttagatggagtaacattagagtcagttacattattacaaaaaatgagagaaggcgctgtttatagaacatcattgccttcacttgaaactttccaagaaaaatttgtttcttatgcaaaagaaggtaatccttgtatatatttagctttttcatctgaactgtctggtacatatcaatcatcagttgtcattaaagaggaagtaaaagaaacatatgcagatttagatttagaaattattgatacaaaatgtgcttcgcttggtcaaggtcttgtcgttttagaagctgctaaaatggcaaaagacggcgcaccaaaagaagatattttaaaccgtgtcgcttttctaatgaaccatatggagcacatcttcactgtagctgacttacagtaccttgttagaggtggacgtttaagtaaagtagctggttttatcggtggtttactaaacattaagcctatcttaaacgtggaagaaggaaaacttgtaccacttgaaaaggtaagagggaaaaagaaagtattaagccgaattgttgatattatggaagagcgtggtaaagaccttaaaggtcaaacaatcggtatcactcatggtgatgacttagaaacagcggaagcattaaaatcattaattacggaaagattcggttgtgaagtatttatcgtaaatacaattggtgcagcaatcggagcacatacaggacctggcgttataacgttatttttcttaaatgaagtagagtaaaggattgatcatttgatcaatccttttttctttaatctgtgattaccggtcgatatggtattggtgaagataaaatctttgaagttttcctatatgaattgctctcttgtagagggagtattttttatatgtggaatgatacttaatggtagaagaaaagagtataaataagaatgtatttgtaggaatttaaatatttgaagatatcaaaattttgccatttcatatataattgtgtggggagaaatatctgtaactatttgtaaaaataggaggcgactataaaaatgcaagaaattgctagatgggatttaaatcgcttgtatttgaatgaggatattctatttccaattttggagttgaaagagaaatattttgtaacaaaagatgtagaggttctttcaaagctaatacaagctattgagaaaacagaatactatttgtactgtagatcagttgaagaaagtgtaccatctgaccttactaaattgaccgtgaaagtgaaggaactaaaaaatgaattacagcaagtaataaaacataatgaagtggaaacttcagataatactaagttaataaaagatgagcttaatgcttgggaaaatatgtacatacaattacgggataggatagaaatagagcacaataataaacaattatcctttggacaagcaaatactattgcaatgaatagtgataatgaaaaggaaagattagaagtattcgagttacttacaagtactttacataaggaaaaagaaatctttgctactgtattaaatcaaatagggagattgcgtaatgcaaagagtaatgaaatagaagatagagagattttaacacaatcttttcatgcgaatggcatttcagaaactgtattattccaaatgtggaatgcgacagaagaaaaccttgataaattagtaagtgctttaaacgtgtataagaaaggaaaagcttcaattacatggcatgaacttatgacggtaaaggaaagtaatgagatcatgattcctttttcagtagcaatacaaaacgtttatgatgcatgtaagaatattgatgaagaattagcagaatttgcacgtaatgcgatagaaagtggttgggtagatgctgaaccgagagagaataaaccaccaggtgggttttgtgctccatttttcagtgagaaagaatcgcgaatttccattcgttatgatgggagtatagatagtgtaagagtgctcgctcatgaattaggacatgcttggcatttttataatatgagttttgaacaatctacatcttttttagatgattatttgccaatgagtacggctgaatcagcatctattttctttgaaacggtactcttaaattatctaattgaaacaacggatagtaaagatatgaaaaagtcattacttagctggaaaataagaaatagttttaattatgtaatggcaatacgagcatcgtatcagtttgaaaaaacattttatgaaaaatgtaaagagggtcctttaagtgctgatgaaattgagaaattatctataattgcacaaaaagaagcttatggaaaagctttaagtgaataccagccgtttgtatggatgaaatatattcaattttatatagcagatgttcctttttacaattatccatacacatttggatatttagtaagttttagcttattagaaatagctcaagaaggtaaaagtacttttcattcgaaatataaagagttcttacgagaaacaggaaaggctccagtagaggagcttatgaaaaaacattttgaaatagatataagaaattatgaattttggaataaagcttttattcaaatttctaaagacattgatgaatatttgcagcttatgtaaggggagagtacagtggatcagcagtttataaaaggtatacctttttcaactttagaatatgcaaaagctataagtttattaaaaggttggctacatgaacaacaagagaaaccaaggtttgtagtaactgcaaatcctgaaattgttatgtctgcaaaggaaaatacggaaaaatcaaaggagtttaaaaagatgttactatctgcggatttaataacagcggatgggattggtgtcataattggctcgaaaatattaaaaggaactttgaaagaacgtgttactggggcggatttaactcacgatttaataaaatattgtaacgacaatgaatatcgtgtctttctttttggagctgcgccagaaagtaataaaaaggcattagaaaaattaaatgagcagttcccaggagcacaatttaaaggacagcatggatttgtaaatggtgaagaaatagaagaaataaaaatgaaaattaagcagttcaagccgcatttactactcgtaggactaggttcaccaaaacaagaagagttcatctatgaaaacatacaaacattaaacgttccgctatctattggtatcggaggcatgattgatataatatctggtactgtaaaaagagcaccaaaaataatgagggatactggaactgaatggctgtataggttactctcacagccgaaaagattaaagagacaacttgtacttccgaaatttttattatcggttatgtctgagcggattaaagggattaattaataaaggggactacatacataaacagaatcggcattatcggagcaatgcaaattgaaatagatttacttttaaaaaagctagtaatacaagaagaacagacaattgcgggaatgccattttatattggagaattcatgggaacagaagtaattattacacgttctggtgtagggaaagtaaatgctgctgcatgtgtgcaaacattaattcataaatttaatgtagactctatcatcaatacgggcgttgctggtggattacatccaggtgtaaaagttggcgatttagttatttcaactaacgttacccatcatgattttacatatataaaagaaaataattgttccatttacattgctagtaatggtttgaaagaatatttacgagcaatcgtaacttattatgctttagacaagtgggtgacagaaacgtttagtattgaacaaatacaatcgctaaataaaggtgacttagttaaaagtattatgaaccaatatgatataaaagaggcagcggtagttggtgaccggctatgtgatataaatgcagcgaaagacaacggtttacttgcaattgggtgcaattttgattttgcgcaagaagatgaacttgctcaggctgatgtagtaatagatgatttaatggagttgaaggggatattacctgctgtacagaggtaaataaagtgtgtgcgttttttgccaagtcctatatgtcttagtttatggagggaatatgattaaaaataattttaaaattagtaatattcctgcggttttatggggagataagagtgataaaatttttattgcagtacatggaaatatgtcaaataaggaagatacaattattcaaatattagctgaagaagccaaacaaaaaggttatcaagtattaagctttgatttacctgagcatggagaaagaaaagatgataatacgccttgcaaagtacagatttgtgttagtgaattatctataattatgaattatgcaaaagaacattggaaagaaataaacgtgtttgcatgtagtatgggagcgtattttagccttttagcttatcaaaatgatgtggtagaaaaggcattatttttatcaccagtagttaatatggaacgaattatcgaaaatatgatgaaatggtttaatgtaacaccagagcttttgcaaaaagaaatgactatagagacacctattggtcaaaagttatattgggattatttatgctatgtaaaagaacatccgattaatacatggaatatagatacatatattttgtacggagccaaggatgaactgtgtgaacttgaaactattaactattttacagaaaaacatcgttgtgaattagaagttatggagacgggtgaacattactttcataccgaagaacagttaaagatatttgaacagtggttacacaagcatatcgattaacaaattacaatttattttgaacctgttagagaagaatgagaaatatataaacttatagtatatttgagagaatttataaatggtgaatgtatacacttaaacaaacacatgctttaattcgataagaattaaacaactttaaagagccttatcacacactagattgtagcaaggctcttatattttcataataaaattaatcaactgtattatcgatttacatatgaagtgaagaatacgcacgctataaattacataaagtaacaaccataaaaatgctcagaataaaagattctcgagcatttttatgtattttcatacttagggggaatggacttgaaagatatacatattcaacaaatagaaaatttaatggaatatgaattcagtcatctcgttcaagacagtgaagaagaaggttttaatttccttataaggctaataaatgaatataaaaacaaaataaatgtattcaataaaactggagaatgtttatatggtgttttccaaggtgatatgttaattggagttggaggtttaaatgaggatccgtacacaaaagacaataagattgggcggttaaggagattttatatttcaagggattatcggcgtatagggttagggaacttattattaaaccaactattatgtcatgcggaaaaatattttgaagtgattgttttacatactgacacgaagcaaggggatgtgttttatactgcgaatggatttgtaaaagggggattatataagggatcgagtcactacaaactattatagagattgctatccaaataatagctacgaacaggttttttgttggtaaatcgatatatcttaaaaatcgctgatatatgaagttgcgatccttatattaaaagacaacttttataatttcatttactaaattgttattataaaaaagagcaccttagcttttaaaatttagcttataaggtgactccttttcagtcaattacgttttaacgttcatttgtttcaataataatcctggtttaccttttacataataaaaatgcgggttattttcatcatcataaagcataatataaggcttttcatttagtgggagcagtataagtacttcgtctattgtagtgtgtaaccattgattagtaatagaaaccggcttagataatgggatttttatcatatagccatcttttggaacgacatttaagtttttaaatggaccagtaattgctttagcgtattgaactgcttctttttggactattggatctaaagattgtttttgaatgaccatttctttttgacaatcaaatacttcaatttgttgatttgtatttgcgaacgcatttgttgataatagaaatagaagaagagaaatgaccccgattttttttatcatagtacaacacctcaccattactatcccctcaaaagctttaaatatttttctgtcacattcatgtaacaaagatgttgtatgatacaattggtttttgtttaaaagcaatggaggaaaaaatatgaaagttttaattgcagatgacgaacaagatatgttaaggattttaaaagcttattttgaaaaagaaggctttgaagtattattagcgaaagacggagaggaagcacttcaaatattttatgatgaaaaaattgatttagctattttggattggatgatgccgaaacatagtggtattactgtctgtcaggaaataaaaaagaattcaagcgtaaaagtattaatgcttacggcgaaaagtgaaagtgaagatgaattagcagcgcttcaaagtggggcagatgagtacgtaaaaaaaccatttcatccaggagtactaattacacgagcgaaaaaacttattcagcatgatgatattattcaagtacaagatgtaaagataaatttcgccaaaaataaagtatataaaaatgatatagagttagaaattacaaaaacagagctcgaattaataaaatgctttttaaatcataaaggaactattttaactcgtaaaaaattgttagacattgtatggggatttgactattttggagaagagagaacggttgatacacatgtaagaaggctgcgtaaaaaaattggagaaaatattattaagacgcatcgtgggctgggttatagtttggaggaacaaagtgaataaacttgggaaaaagctatttctcagcatttctttaaccgttattcttatatttacaatttctttattattaattaactttctcttgccgaaatataatatttataaaacacgtgaaaacttaaatgaatttacaactcaaatacaaaatgcgccagtcaatgatttagaagatattattcatacaattgaaagtgaaaataatgttacaattgcgtatacgccaattaatcagtcagaagatgctatgaacgacgcgttacgcatgcaacttacgaaaaagaaagtaacgttaaataagctttggattacgaaagacgaagttatgaaagtgaagacggaagggcaatcgaataaactgtacgatcaaggaaaggtaaaagcgagtttttttgctaaatatattgcgaaagatgatacgataattttaattgggacttccattgcgaattcaaatgaaattataaatacgttaaatacattttacttatatatcctatgtttctcgctccttcttattattttacttgtgtggatactttcaaaaataataacgacaccactgaaagagttaagtgatgtggctcaggatatttcacatttgcagtttaaaagaacgaaagtgaaaacgaatgatgaaataggagagttggccaatagtattaatatcatgagtgaaaaactacatgaagcacatcaagacttaactgatcgtaatgaacatttaaaacgatttatgggtgatgtaacgcatgaattaaagacaccgatcgcattagtaaaagcatactctatggggattaaagatggattagatgatgggacttatgtagatacaattattaaacaaacagatcaaatatcaaacttaattgaagaactattacgattttctaaactagaaagagatattttacaaaaagaagaattccccattgaaccactggtccagagtatattagataagcatcagattgaactggattcgaaagaaattaacttgcaagtaaattgtaatacgggcgatacaatcgtttatgcagatttaaataaaatgagaatggtgtttcaaaatttaatttctaatgcgataaaatatacagcaaatcaaaacataataattacattagaagatagaaataaaagtatatatttccaaataaaaaatggcattcctacggataaaattaaggatatcgagaaaatttgggagcctttttacgtactagaatcttctcgtagtaaagaaaaatcaggtacaggattaggtctagcgatagtgaaaagtattttagaaaggcatggttttgaatatggagtttcctctatagatggagaaattcaattttatataaatgtgaaaaaggactaatgaaaatattagtcctttttgcagctttagagattagcgatacaggatgaatcaccataattttcaaaattgatgtattaaatggagaattagcaaatgttctactttcattaaattcacgtgaagttcacaggaaaacgttatatttacatagttatatttgaatttaatgaagtgaggtattcagatttgaaaagaaagaaattagtaattggtagcattttaatggggatgacgttatctttatctgcatgtggttcatcagataatattgtaacgacaaaatcaggaagcatttcagaaagtgattttaacaaaaaattaaaagaaaactacggtaaacagaatttatctgaaatggtagtagaaaaagtattaaatgataaatataaagttacggatgaagaggtaacgaaacaactaaaagaattaaaagacaagatgggcgataattttaatacatatatggaatctaatggtgtgaaaaatgaagatcagttgaaagagaaattaaagcttacttttgcttttgaaaaagctattaaagcaaccgtaacggaaaaagatattaaagatcattataagccaaagcttcaagttagccatattttagtaaaagatgaaaagacagcaaaagaaattaaagaaaaattaaatagtggcgaagatttcgcggcagtggctaaacaatattcagaggatccaggttctaaagaaaaaggtggggaactatctgaatttggacctggtatgatggtgaaagaatttgaggatgctgcgtataagttagaagttggtcaattgagtgaacctgttaaatcttctttcggatatcatattattaagctaacggataaaaaagagcttaaaccgtatgaggaagagaaagagaatattcgtaaagaattagaacagcaacgtatacaagatcctcaattccatcaacaagttactagagaactgcttaaaaatgcagatataaaggtatctgataaagacttgaaagatacctttaaagagttagaaaaataataaatggaatgtaaggcaagcgatagaaatatcggttgtctttttctctatttatcccgctatttgccgggcagtaagaccccacctcaaaattcagcgaaagcaaagaagtggccctgctgatcgtaaacgcccaattggtgagggctgattaaagtttcactttataaagaaggaggaagtgggaaaatactttcatacctgcattaaattttacttaataagaaatctttgagtttctcaacttttatataaaataaaactgaattttcagttattttgttatatagtaaaagagaacgaataaggggagggaacattttgagtaaaaagaaaatggcaattacactgtcagcaatgctatctgcaacaattatacctagctttactatggatgtgcatgcagagaagaaggaagagactaaaagtacaaaaattgaattagaaaatgggatgacaaaaccgatttattctctcgatgaagctattatcgaaaatttatatgtagagacagaagttgatagtgatcgagacggtaagaaagacagagtatcgataaaagttatgcgtccaaagacagatccgaatgtgaaagttcctgttatttatgaaatgagtccatatcgatctggattaaaagatgttcctgtatataatgtagatgaagaattgtatgcgtatgaaggaaaaccgtatggagcggttaatcttggttcgtatgggaactattacgtgccaagaggttatgcagttattctaggcgaaagtatcggtactggaaaatcagatggatgccctacaactggagatgaacaagagatactcgggacaaaatctgttattgattgggtaaacggtcgcgcgaaagcatttacagaacagggtgaggaagttcaggcaaattggtctacaggaaatgtaggtatgactggagtttcctataatggtactttaccaaatgctgttgcgactactggagtcgaaggtttaaaaacaattattccaatcgcagcaattagtagttggtatgattattatcgtgcaaatggtgcagtcattgctccaggcggatatcaaggggaagatacagataatatggcagaagcagtactgacaagggaaaaccctgaagtttgcggacaagttataaaagagttaacggctggacaagaccgaaaaacaggtaattataatgatttttgggataaacgtaactatgtaaaagatgctaaaaatgtaaaagcgagtgtatttgttgttcatggtttaaacgattggaatgttaaaacaaaacagttcgcgcaatggtgggaagcacttggagaaaataatgttccgcgtaaaatgtggctacaccaaggtggtcatggtgggacatcaagtaataactggcagcaaacacaaaataaatggttagattattggttgtacggaattgaaaatggaattatgaatgaaccaatggttgatgtgcaacgagaaaataaaacgtggcaaaagataaaaaattggccagatccagcggctgtaccttcaaaaatccgtatgtatttaagtaataaatcagtcaatttaccattaagtatgggagcggctaataaagttttctcattcttagatgatgcacaaatgaaatcaaaccaattagtagcaaacccagaattagaagtagcaaatcgattagtatatacaatgcctgtactgcaaaaagatacgcgtataagtggtacaccaaagatttcaattacaggaaatattgatcgatctgtatcaaatttaacagcattacttgttgactatggaggagcgaagccggaaatcgtaacgagaggctggatggatccacaaaacttaaagagtatagaaaattcaacagcgattcaaccgggcaaagattatacatttacatgggacatgcagccagatgattatgtatttaaagcggggcatcaaatcggagttgttttaattgcaagtgattatgattatacaattaggccgaaagctggcacgaaacttacagtgaaattaagtgaagtgacattgccgattgtgaaataaatattttttctaaagagcttactaaagtaagctctttaatttgtagtctgaatttttaatttttatatttcaaattggaaggttatgtaatacaatatcattatattctatggaaagtgagtgatatattatgacagttagctctttcgaaatatcattaaaatcagaggtgcaggaagattagttgaattgaaatcttccgtacgtaaaaacggaggagaaaataaatgtttagcttttatagtacactttgtacagaactgtatgattacacaaaaccagtcggttattctttaaatggtgatattgagtattacaaaaaacggttaaaagattgtagaggaagaatcctcgaagccgcagtaggttcaggacgtgtcatcattccgcttctagaggctggttttaaagtggatgggatagattattcacctgaaatgctagattcttgccgtaagcgctgtaaagagagaggcttacatcctaatttatatgaaggaagcttgcaacaattttcacttccgcataaatatgacgcaattatcattcctactggatctttttgtttaattgaaaatcgtgtggattctataaatgcattgaaatgtttttatgaacatcttaatccagatggacgattaatcgtagatattatgcttccgtatgactggaagactggggaaattcatacatcgactttctctttgccgagtggagacggaatcacattagaaaataaatcaattgaaatagattggctgaaccaagttactgtatcatatttgaaatatgaaaagtggagtaaaggacagttagtacaaacagaactacaacgctttgcgctgcgctggtatggaatagaagagtttaaacttcttttagaaagtataggtttctctaatattacgtgctctgctgaatatgattatgaaaaagaaccgtcaaatgcaaatcaaatgattacttttgaagctgtgcgaaaagaatagaactaaaactatgaataaaaaataaggcaatcgatttaaaatcggctgccttattttttattttatgtaatggtttatagagaaagattggagggaaataaatgaaacttatattaatatttggcccacaagcagttggaaaaatgacagtggggcaagaattagcaacattaaccggtttaaaactttttcataaccacatgacaattgatttagtaagtccaatttttgattacagtacgaaagaagcaaaaagactagtaagtttatttcgtaatgaaatatttgaagaagtatctaaaagtgatttatctggaatgatttttacgtatatatgggcatttgacctccaagcggattgggattatatacatcatgtagaaagtatttttgaatcaaaaggtgggacagtgcattttgtagagctggaagcggaattagatgaaagattagaacgaaataaaagcccgaatagattagaacataaaccgaaaaaaagagatattgagtggtctgaaaataatttgaaagaaacgatgaaaaagcatagattaaactctcttcatggtgaaattgaaaaagaagagtatataaaaattaataacacgtatttgagtgcaaaagaagtagcggaaatgattaaagagaagtttcaattgtgaaatttttgaagtctatttcgttttcgttgtccaagcattctcctactaattacatatactatttatgttaaagtcggctactattttatatagggctgttattttcctataaatgctattttagtgaagtgggaggaatcaatttggaaaacgtagaacaagatagaattgaaaatcaagtgtattcaaatcgtgtagtaagatcagaatttgattcgaattgggaaacttgtatatcaaagagtggttatgtaatttatgtagcaacaagtaataatgctgaagtaatagtgcttcttgcagatggttcaagtaaattattaattttcgaaaaaggcggtaaagtagtagttggtggcggtggaacaagtcattacagtaagccgcatattgcaagaaatatttaagatagaacatgttaattaagaagaagctggaaaacggttgtcattcatgtttagggcatgatagacgaaccgttttttatttgtttataaatttagaagaacttcattgattacaaatacatcaggatgagcagcgaaattagaagaaaacttggtgggtaatggtacaaaatattatgtaggtttgcaagaatcttataagcgatataaaaaagcatttcctatttggggaaacactacttctatgttatagtataatagtgtttttagatggtgctattttaatatatttataattttgttatgtattatttttatattaaataagcgtctaaagtattttttgatataaggagtaataattagagaaatgaaaaatatagactttatactagaaagtgatgaggcattaaaaccgtctgaacgattagtactattattattagagaagcatagaatgctatatacgaacgatctattggcattatcaaatttatcatataaaacattaacagattcattaacggcgctagttttaaaatcgtatgtgttaaaggaaacgggtaagggaagaagacagaactgctatagattagtatgataaggcagctgttttagagacttttacatatgttttttcaatcgtaaggtggaagtgtgttttttgttttcaaacgaaaaaattactataagaggggttaagatagtagcgtttcatttttgtaaatgtaattatttcatcattgaaaatacaaaaatgaaataaacagtataaaaaagaaataaaaaaacaatccattttaaaaagggattgtttttttattggaataatattatttgatatgttgaaagcatgaatagcagaatagacattacctgttttattttatgcaaatgaacaaatatgatgaaaactatgtgtatagttttttgcttgctttttcagtaactctaatgaaattatggtcttcattgtttaaaggcagtatttttaacattattgctattcagcattaagcacaaaaaagtaatatatataatattattatgtaaacttaagattttaaaaggaaaatataataattaatagaacatgtagaaggagatgcttaaatattttgaaggatgggagattattatggagcatttacaatcaatagcacaagctgttataagtggtaataaggaaaaagtagtgaagtttataaaggcgagtccaagcattgttaacgaatgtagtgaagatggctggacaccacttcatttagcagcttattttggacagaaagaaatagcgagttttcttttagaaagcggtgcagatatacatagtagagcgaaaaatgaaaatgaaaatacacctttgcaagcggcaattgcgaacaagcaaagtgaacttgtcgctttcttaattgaaaaaggatcagatgtaaatattatgcaaagtggtggctggacaggactccacgaagcagcattattaggaaatgaagaaataattatgttgctccttaaaaatggagctaataagatgattaagaaaaatgatgggaaaacagcgtatgatattgcattagaaaaaggatataatcaccttttacatcatttgaaacaggaagtgaacttatgatgaataaatggagtgttggtatatttttatttaatgaagtagaagtgttagactttgcagggccatttgaagttttttctgtaactgaggtgaatgaagaaaaaacatttactgtttatacagttagcgagaatggggaaatgattacagcaaggaatggattgaaggtacagccagattatagtattgaaaatttaccaccagtggatattttaataattccgggtgggctaggtgctagaaaatatgaaataaaaaatgaaatagtaataaaatggattcgccaacaaatgaaagaagtaaagctgatgacttcagtttgtacaggagcgctattactggcgaaagcaggtttactggaaggtttaaaagcaacaacacattgggctagtattgaaaagtttaaaaatgagtttcaaaatgttgaagttatagaaaatgtaaagtttgtagatgaaggacatattataacatctgccggaatttcagctggaattaatatggcatttcatattgtgaaaaacttgttaggtgtgcatgttgcggaggacacagcgaagcgaatggagtatgatattagtttgccaaattaaaaagcccggattgggctttttatattgaatgaatatagttaagctcttcatcactcaaaatagggcgaacagatgcatttgcattttcttgtgcttgtgttcctgtttttgcaccaggaattacaacacttactgccggatgagagagtacatagcgaagtgcaagttgccctaggatctgatttttatttgagagcagccgaagtttctctacggtttgtaagtcttcttgaaaccaaatttcatttggccaatctttgcgtaaatctccatctggaaaaattgttttatttgtgaattttccagttaaaatgcccatttttaatggaccacgaataacagctcctagatttttctcttgtaagaatggtaatatatctttttctggttttcgatttaatatattgtaatcaagttgtacgatatcaatttcgttgttgttattgaaatgatgaatgtattgtaaatcatgagtcgaaacaccgactgctcttactttgccatcacgttttaatatgtcaaatgcacgtagaaatgcttctgtttctctacgattatgccaccaaatatgacaaaaataaagatcaatataatctgtttgaagacgttgtaaacttgtttcgaatacggcgatgattttttcgggagtatcatatacaggaactccattagggtcgtagtgatgtccgattaaaccacctttcgttgataggataatatcattacgatgtcctttaatcgcggtagctaccaacttttcactatgtcctaaaccatacacatccgcagtatcaataaaattcacaccacactcaattgctttttttatagcggttatagattgtttatcgttaacaggtccccattcatcaccaccgattgcccatgcgccaaaacctatttcagaaacagttattccagttttacctaatgtgcggtaatgcatattccccctccttgtaagcatgttataacatggatatgtggggaaggaattttgtgtgtgaaaaaactcttctacaatagtagaaaaagaattacagaaactactattttatagcagcatgtataaaaaaaatcggtgtaaatatggaaatgtcgtcgaatgctatctttaattggttaatttatgggatatttttgtgaaggagtttattttataagaatagaatttagtttagtaagaaaacgtgccgatggtagtgaaaaatatgggttagggggatttgaatgaggaaactcgagcgagtaaatgttcctaatataccagagcaattatcacaacctagtgacaagcgtaggataaataaaaagaagttaaggcgacttattttaatggtcctttttattgcggcaactactctatatgttcaatatattttaacgaaacaacaagaagtaattgataaaaagaaagatacgattacggatcaaaagaagcaattagtatctttaaagaaagataaagattctttaaagactaacatagaaaatttaacagacgatgaggaagaaattttgaagttagcgagaaaagagtatcaattttctaagtcaaatgaaactatatttgtgatgccaaagtaataaaaacagttagccattgaactgcacccccaattgttagacaccgtctaacaattgggggtgcagttttttatgtatgaatgtcatggtacaaggaacaatcacatattgtagaaatgaagagtttaagctattttcataaatatggaatatgcactaaaataaatgttgttaaaattctgtcaattatattataatacaaggtaagcggatacattttttaatcaacgttgagttcctcgctcatacgactattaagaaacccgttatcctcgtataagaaaggaagatagctgtgtacgcctcaaatacaatttatatcgtaggggatgcgaaagcacctcaaaataatcccattactgaaaagtttaaaagctatttcgtagcatttatacttgttaaggatacaggggaaattgtagatgcagactgctcagcgacaattgcattaacatctcaatttgttaaatatttatttctacataaaaatataaatgacccggcgttagtaatggaagtaaagaaccgatatttcggttcttctcaaaaagcgttacttgtagcgctaaaagatgcacagaaaaaatataatcagattgctgctttgtctactcaatcatagacaaaatccagccgtaagaatcattcttatggctggatttttttatttcacattatcgtcctacatcaaaagtgaacgaaaacaaagtagagagatagaagagtaaatgcccaataggtttacctaataatccgtgggtataaatctccggtggattaaaatttcacttcattggagaatgaaaggatgaacaaaatgaaaattacagatgtaaaagtaaatcgtagacgtgtaaaactgcatacaccgtttaaaaccgcgcttcgtactgtaacagaaattgaaagtatagatgtttatattcatacagacgaaggagtgattggtaagggggctgcagccgcaacgccagttattacgggggatttcaccagcggaatggaagaagcgattttaggaccgatgcgttcatgtttaattggtcaaaatatcattcagtttcagcagttactacagggcattcaaatgagttgtattggaaattcaagtgccaaagcagcggtagatatcgctttatatgatgtatattgcgaatatcaaaatgtgccgttatatgcattgttaggcgggaagaaagaaattcataccgatattacagtgagtgtggatgagcctgtattaatggcaaaagaagcgaagaaacatatagaaaaaggatttcaaacattaaagattaaagtgggtaaagaggcgcatttagatttggaacgtattgaggcaattcgaaatgtggtaccaagaaatacgatattacgtttagatgcgaatcaaggttggagtccaaaagaagcggtctctattattcaagagatggaaaatcgtaatttaaatatagaatttattgaacaaccagtacacgcgaaagattgggatgggttaaagtatgtcaaagatcgtgtgcaaacgccaattatggccgatgaaagtatattttcagcaagtgacgcattaaagctcgttcaaggaagatatgcagacttcattaatattaaattaatgaaatgtggtggtatacgtgaagcatggcgtattgcagatatcgcagaaacagctggtgtgaagtgtatggtgggcagcatgatggaatcttcactttccgttagtgctgttgcgcatttagcggcagcgcatcctaatattcattattttgatcttgatgcaccgctttggttaatggaagagccagaaggaatgacttattctggatcaaaggtaaaccttcaatcgacagtgaatagtaagtcttaggagaagagactagtaaactatcttttaagggggataaatatgaaaaaagtaggaactgcatttttaacaactttatttatattttcatcgtttacatcggcaaatgctgaagaaaagaaggataataaagcatttatagatgtatctgctgcaacgttatggacagtacctgattcattaaggccaatcgatacaccgagtacaacaaatccagtggatctatggaaatggacgaaatcaatgacacttgacgagaaactatggttaacaaatgcaaataaattagaaacacaagcgttactcggtcaagaagtaactgttattgataagaaaggcgaatgggtgaaggtattagtgcatggacagccaacaccccgaaatgaagaaggttatccgggctggatgcctgaaaaacaattaacatataatcaagaatttgcagataaaacaaatgaaccttttgtcttaataaccaaaccaacagcgattttatatataaacccttctgaaaaacataaatcacttgaagtcagttataatacaagactgccgctattaagtgaagacacaatttcataccgtgtattgttgccaaatgggcaaaaagcatggatacgtaaaaatgatggaacagtttaccaatctcaaactgatattccaactccggcggccgatgatttaattaacacagggaaaatgtttttaggattaccgtatatatgggctggtacaagtggttttggatttgattgctctggcttcacgcatacgatctataaatcgcacggcattacaattccccgagattctggaccgcaatcaagagcaggagttgcagttgataaagaaaatctacaaaaaggagatttaattttctttgcacatgatcaagggaaaggtagtgtccatcacgtcgcaatgtatattggtgatggcaatatgattcactcaccaagagctgaaagatcggtagagattataccgctaaatacaccaggatatatagaagaatacgctggtgctcgtcgttacttaccttaaaaatagagggggtttttaaatgaaaaaagttgttcgttactcattagttagtactctattagtttcttcatttttagttggctgcgcaaaagaaaaaactgcaacaaagcccaaagatgagaagaaagtattacagttactagaaacgggtgaaattccgtcgttaaattcagggaaagtaacagatgcagtctcgtttaacgttttgaataacgtaatggaaggactatttcgtctatcgaaaaatgatgaagtaattgaagccggcgcacaaaaatatgaagtgagtaaagatggaaagacatatacattccaattgcatgatgcgaaatggtctaacggagatccagtaaccgcccatgattacgtatacgcttggaagcaattgattaatccagatacagcttctcaatatgcatacattgcgtacgatgtaaaaaatgctgagaagataaataaaaaacaactaggtctagatgaattaggagtaaaagcgaaggatgataaaacattcgtcgtagagctagaacatcctgtaccgtattttacgaaattattaattttaccatccttctatccaattaacgaaaaatatgcgaaagagcaaggtgataaatatggattagaagcaaataaagcggtatataatggaccgtttacattatcagagtggaagcatgaagctagctttacaatgaagaaaaacgataagtattgggataaaaaagaagtgaagttagatgaagtaaactatcaaattgtaaaagaaatttcaactgcggtaaatttatatgaaacagataaagttgatagagctgttatttctacagaattcgtagataaatataaaaataataaagagctaaaacaatatacagatccagttatgtacttcttccgatttaatgaaaatgtaccgattcttaaaaataaaaatgcacgtcttgcgctaagtacagtttttgataagaagggactcgcagattcatttttaaatgatggatcggttgcagcgaactattacgtaccaaaaggatttttaaagggcccagataagaaagattttagaagtacgtctggtgagtttaataagacaaatgtaaaacaggcgaaggaatattgggagaaagcaaaacaagagacaggtacaaatgaagtgactttagaattattaaattatgacttagaaaactttaaaaaagttggagagtacattaaagagcagcttgagaaaaacttaccaggattaaaagtgaatgtgaaattacagccgcatacgcaaaaattagcacttgagaagaagaaagaatatgaaatgtcgttatcacgctggttaccagattatccagatccaatgacttacttagaagtattcctttctggaagcagtgttaataatacagaatatgcaaatccagaatatgatgcattaattaagaagattaaaacagaattaggtaatgatgaaaaggctcgctggaaagcaatgcaagatgctgaaaaaatgctacttgatgatgcagtaattgcaccggtattccagcgtggattatcttacttacaaaaaccatatgtgaaagatttatatgtacatcaatttggtccagctacaagtttaaaatgggcagatttacaaaaataaaagaatggggaaacagacttcacgtatgtgatagtctgttttttcttatttaaagttagaaaaatagttcatggtataatttattagtctgtaaacagtatttgaagggaaaatgatgtctatgtttgaagaagagaaagtaatttatacaaaaagattatttatgaggaaaccaattgtagaagatattgatcagttttataacatattaaaaaaagatactgttggcaaatggctggctaaatcaagaggaatgtcgaaggaagaaacaaatgattatattgggcaacttatcttacattgggaacagtatgacttcggggtatggttgttatttaatagtgaaacaggaaagcttttaggacattgtggtttaagaaaggtagatgaaacaggtgaaatagaaattatgtatcttcttgacccagaacattggaggaatgggtatgcattagaagcagcagaggcttccattaaatatgcaatagagactttgaatgtaacaagaataattgctagagttaaagtagcaaatgagagctcgaaaaaacttttacgaaagctcgggtttatatatactcatgaagttgatcatagcgggcgcttattatcatattttgaactccatacatcatccaaagaattctagacatttcatatattttttcattgttaaaaaataaaattattactaaaattccagtgtgaaatttatgtagaatcttgtataattaacatgtttctatggaaacattttcttgcgctatttatatagggcttaatagaacaaggaaggaaatacatacatgtatataatagataaatagaatggaacatgtatagagacaaaggagagaaaagatgacgtgtcaaaaacaagggttacaatttaataacgatagaaagagggacagaagatgaaaatgaagcatgcttttggtcctataattttagcgtgtgtgctttttttcattatcattctaatcccatcgaaaagtttagtatcgcttattagtgataagaaggtagaagatgcggcaacttctttacaaaaagagaaattacaaagtgttttcttacagcaaaaaatgttagagaattcacagtatttaccgatgtacggttcatcagaatttttacgaatggatgcatatcatccgtctaattatttcaaagtaaatccagctggttttacaccgtttttaattggaactggtggtacacaaagtttagctcatattttaaatatgacatctactatggatgaattagaaggtaaaaaagtagtgtttgttctttcaccacaatggtttacaaagactggtgtatcacaaggggatttcactaataatttctccaaacaacaagcatatcattttatttttaatgatgagataaatccaggaatgaagaagcaaatcgcgaaacggctattagattataaagttgttcaagaagatgatatattaaaaaattcattagaaggtattgtatataatgatacgaaacataacataaaagcaggtttagttaaaccacttgcttatatgcatcgaaatattttagatcatagagatttatttaactctttatttaaaatcgaaccgatgaaagagaaaacaaatatcggacttcgttcaatttcttgggaagacgcacgtaaacacgcagaacaagaagggaaagcagagtctactacaaatacattcggaattgaaaatccgtattatcataaaaataatctgaagaaaaaactaaaaggtttaaaaaactttagagcaaatgaaacatatgatgaatcaccagaatacgatgatttacaaattattttagatttatttaaagagaaaaatgtcaaaccactctttatttctgtacctgtaaatgggccttggtatgattatactggcttcccgaaagaacgccgtgaagtgtattataaaaaagttcgagagcaggttgagaaagcaggatatccagtagttgatttctctggtcatgaatatgataagtatttcttaaaagatacgattcatttaggctggaaaggttggatttattttgatgaagcagtgcaaaaatttaattctgagaaataaagtatagaaatcggaatggctatgagccgttccgatttttttagtatagaggattttggtgaggacaatttgggaatgcatgtatatcttgaatctgtctataatcataatgtttcattgcgaactgggcttgataaggtattcatacacatataattgatcatcatgcgctgaacataatacaccagaagttccttgcccgttcatgaaagaaatgccgataggacgtccgattaagtattgtattttttgctgccaatgcataggggaatcactcctttttgagataatatacgaaagaaatgattgaatggttgcttatccatataaatgtagatggaaaggtgttatataattcctgaagattaatataaataaaaaaccgctataattctgaatttatagcggcttttttatattcttaagcaagatttttacgcttttttgtccatttttttataacgaagtataaaagtataagtacgacgccaccaattgcgaatgatttcacatacggaccagcaatatcgttaatattttcccaattttcacctagtttttcacctaaataaatgaaaataatagaccaagggataatcgcaagtgctgttagtgtagtgaaacgtagtaaaggcatttttgtaataccagcaggaattgaaatcgcatgacgcactactggaatgaagcgtgctgtaaaaatgacaccagttccgtaacgattaaaccaatcttctgcagcgtctatttgctttttatgtatgaaaatatattttccataacgttctaatatagggcgtccaccatatcgtccaagccaataaataaagatttgggcaataacaccgccaattgtaccgaatacaactgcgcctataaatgagatacttccattgaatactaagtatcctgcataagcaaggacaatttcacttgggataatctcaatcataagtccaagcataatgccccaataacctaatccttcaaaaaacgttaatactgaatgaataaaactacttaacattgttgcaccttctagtttatgaatttttgattataagaaccttttatttaatcgcataaaaggttcaccatatgtagattataccttatttgcataggggattgctatttcaattcttttatgtctctcataagtattatagtaaagtatataagccacgttttcatgaagggttaatgaaaagattattaaaaatttctcataaaaaatagaagcatttctgctcctattttttaaggcttgacatctaagttctgtaaaaataaagttgctgttacgtaacgctttgctaacatttgtacataagcggtatgtacagaaagggtcgcaataataatagcgttacgaattgcttcgcgttgttcgttattaatttgatcgaacttacttgcgattttatcagctttttcttttacgatgttttcaattgtatgaacggtatctgttgcatttaattgtaagcaattcccttgattgagttcttcaaatagagaagagtatgctacatataaatgaacaggattgattaaatcatcacttcgatcagctgggtcatttacaataaggcgtaatagcttacgaatggattcaaaatcaagtgctgtttttaaatcttcgacaataaatagtaaggctgcttgttcaattgaatatttttttcctttttgaggagagccaatcatttcttttatatctcgtttcacccagttttgcatagcagttacagagaaacttgtgttttcaatctgattgccaagcgcaactatttcatttaaagaaaaaccgacatcagtatcgtcaattttaatcagcttttcaaaaataggtgaaagtgcggtagtaataaaagctgtaacgctttgtccgctttcaatatcttttttatgtgactttgcccaagcttcttgtaaaataccgagaggctttttcgtattccatcctcttagtgatagaagaagggtagccatttcgtttcgtgtgagatgaaatgtttccatcttttcacctccaaaataataaaaagttcttatgaacttataatatgttttgtttcatttaaagtcaattctgttttgcttaatttttcctttgtgaccaaactgttgaaagtaaataatacttgcatatttcgacaaaagttcatataataagttcataagaacttttaaaatgttcttaaaaacaaatctatcattctgaatttactagaaagatagatttcacatatatctatataaaaggagaatggatataatatgttgaaaaaacttgtagcagtaatgacagcattcatggttatctttggggctagcagctttatgttcgtagatcatgcagcagcgaaaagttacaaatctggtaaaaaatcatttacaccaagttcaggtcaaaagtcaaaagttgatttaaacaaaaaagactcaaatgtaaattctcaaaaaacgactccagattcaaaaacgaaagcaacaaacacggcaccaaaaagtaataaaggaagctttatgaaaggtttattactaggtggtcttggtggtttactaatgggtagcttatttgcaaatatgggagctcttggttctgtattagcatttatggtaaatatgttagtaatggctggtatcgtaatgttagcagttcgtgcatttaaatacttcaaagaccaacgtaagaagaaggcagatgaagtagcatggaaacaataaaaatttctgaacaagagcttataaatgcgctttgtatatatatcgctgaaaaaagacaagtgggtccagaagaagtattagttgaactcatgtatgatgacgactacggtttctctgcggaagtagaggtaaatggtcgccagcaaattttaattcaagcaaacttaatcgaagctttacgcttattgcttgacagagaatataatgtcaatccattcgcagcgagattacaacttgaattagatgatgaagaaggcatttacgcattagcgaaatttaataactcagatgagtagagaagagagctgttgagaataatctcagcagctctttttagtatgtgcatatgtagatgagtaatcacgccaaatttcattcatctttcgtctaccgatatctaccatcggattaaactgaattgcagatttctgacgaacaaagtgaacgttttgaatggcgtgagataattgttggtcgactatatcacgttttttgcttgcatatttagcaatagatagacctgcaactgttccttgcgccatcgcaatttttccgctttcaatgcctgtaatattgccagctacaaataaaccaggaagaggagtttccattgtttcggaatggagaggaacgtgtccacctaattctgaaatgtaatggaagggacaaccagctacagctgcaagttcggcaagtgggtataatcccccggcaatacaaacaaaatctgcttcatatattttctctgatccattaataacatttcctttagagtcaatattagcaacacgtacaccttcaacttgatctgttccgataatttcaagagctgctttccgaaggtgaagtggcgttccgtttattttcattccgctgtttggatagaatgttaatccagcttttcgaacccaatcatatttcataaagtggctacctattcgcaaaatagcagaaggagcgagatgtgctgcatttaaaagagagtttaaaacttcttcaggttcaccagctttttgacttaactcgcttttctcagggagtacaatatgatccactgtaattcccgctaattgcaattcacttaaaatggcgaaagacaaaatgttagcaccaataataattcctttttttccaacttgcacgcgatgaacatttgtcataacttgagctgctccaattgacatcactcctggaagtgtccagccaggaaggggaatagaatattccgcagctccagtagcaagtagtacgaaaggcgcttctaacgtaccgatattagtatgtacaaaccaattgttttcatctctatctaaattatagaccgaaacaccgcacctgatatgtactgaaagtgattctgcttcttcatgaagtcgcttcgattcttttattccgttccaccattctccagtaggctcttgatgcaactgtcctaacaatctcccgcccggcttcataaattcatcaataacgagcacttttagtccgaaacgagcacaagaaatagaagcagataatcccgctggccctgcaccaataataattacatcactcatcgttttttcaccatctctctcacgatattcggatgctgtttcccgctttcaacaaccatgttttcttctacaacagttaagcatgcgcgtacatttgtttgattatttactgtcatgcggcattcggaacagtgtccgatattacaataaatacctcgcggtgttccgctatcttcatgaactcttactgtcctaattccatttgctaacagggcagcagctatcgtttcatgttcatatgctccgtattgatgaccgttaaattgaaaggtaatacgctcactactttgtaaagtacctaaaatagggtgatgtgtaattctactcatttactttcacctaccgatccaaaagtaactgcacgtattggtggttgatattttaacggtagttcattaagagttacgtcaggattcgcattttcaatcattcgatctatcattattctgcatgtgcgaccaccgcaaaatcccatgccagcacgtgttcttagttttaattctcttgccgagcagttatattcagcaattgtcgattgaagttgcccatatgtaacctcttcacaacgacaaacgattaagttgtttttatttgtcatgtgtattcctcctctagttcggttttcacaaattatatatgcaaaaatcatgccaatatagaggagggagagagggctacctgtaaacgcctgatcggtgcatactgattctttattgaagtccaagtttctttaaacggttatataaagtagcccttgttacaccaagttgttttgcgcattctaatttattcccatttaaaattcgtaaagccctttcaataacttttttctcatgctcatccatctcttcttgtaaagaaaggattgtattattgttgctgagtaatagggaatgggctgtatggttgtctaaagtttcagtcgtatgaaatggtaaatattcttgttttataattccgtctgttgcgaataccacaagccgttcaacaacgtttcgaagttcgcgaatattacctggccaattgtaatgaagcagttcatgcataatgcttgaaggtaagtcacgaattggtctgttatagttgattgaaaaatcgtttaagaaagaataggttaattcaataatatcctcgcgtctttcgcgcagcggtggaatctgcaagctaactacatttaagcggtaatataaatcttctcggaaagttccttttctcatttcttcttgtaaatcacgatttgtagcagcgataatacggaaatcaatattaatttctttttcaccaccaactcggtaatactttcgctcttgcagtacacgtaacagttttacttgcatatcaagtggcatttcacctatttcatcaagaaataaagtaccgccttgcgcgagttcaattttacctttttttcctttactatttgctccagaaaacgccccacgctcgtaaccgaataattcactttcaaataatgcttctggaattgccccgcagttaatcgaaatgaaaggcgccttcgctgcttcacttgcttcatgaattgctttcgcaaatacttcttttccaactccgctttccccaagtattaaaacagttgatttcaccgaacaaacttttctagctaattgtatcgttctttgtataacaggactttttccattcatcgcaaggaatggatcggattcatctttatactttgccacttcttgttctaaacggtgcatttcatgtgacatattaaatagtttttcatttaaagcgacttgatttgtaacatctgtttctgaaacgactgctcctataatttcatcattacaataaactggatttgaattaattaatacgaataaatcggggcgaggctgatggaactgagcgactatgctttttccatcatgtaaagattgtaaaatttccaagtctttataatcaaaaaaacgagtaatcggttgcccaataatctcattatggttgactgaaaatattttttcagcaccatctgtccaagttcgaacgcattctttactatcaattactgtaacagaagagtcagttgtttgtattacagtgtcataaaatgactgtagttcattgtaggacttataaagaaatggaatcatttgctgagaagttatacagcatatcggctcatcgttttcgttaaggatgataacagctaattcataagaaaaagcgtcaattaatgcagtgaatgagtcatctacataaataattgcgcaattatattcttctgtagtagaagggaggtaataaaacctttcgtttattttcttaatgcgatcaaggctacatgtatgattgattaaaacgctttccaaaaattcttgtatagtcggaaatgagaattccataatgtcctcctgttatgtataaaaattttgacagtgataaaaaaataatacacctatttactatgaatttaaaatatttttacaaataaaaatattttttataaaaattgtatatgtacagaattggcacgtcaattgcataaaaagaaagtgagagggctaggaaaggaggagtatattgtgaggcactgcgacgttttaattataggtggtggaataatagggtgttctatcgcttattacacttcaaaatacggaagagacgtaacaatcattgaaaaaggggaatttgtcagcgggacgtcttcacggtgtgatgggaatattttggccattgataaagacccgggatttgatagtcaaatgtctttagtaagtcaaaaattagtaactgatttaagtgaagaattagagcattcatttgaatatagggcaccaggaagtattctcgtatgtgagtcagacgaagagatggaagctgcgcagcaatgggtaaatcggcaacaagaagctggattaccgtttcgaatgcttgataggcaagatataagggaagagtcgcctttttttgctgatgatttattaggcggtttagaatgtgcgacggattcaactgtgaatccatatctccttgctttctcgcttctgtcagaggcacaaaagtttggcgcaaaagcttttaagcagacggaagtaaagagtatggaaatagagacggatggttcatttgttgtagaaactacgaatggaacttttacagcaaaacaagttgtaaatgcagccggtgtgtgggctcctaagattggtcagatgttaaatataaatataccaattgaaccgagaaaagggcatattattgtagcttcaaggcaacaacacgtaggatgccgtaaagtaatggaattcggttatttaatttctaaatttggcggaaaacgaaaagtggatgctttaactgaaaaatacggggttgcgctcgtatttgagcctactgaaagtcaaaatttcttaattggtagtagtcgtgaatttgtaggatttcatacgaggataaataatgaagtcattaaatgtatcgcaaatagagcaattcgcttttatccgaaaatggcagatatgatggtaattcgttcttacgctggtttacgtccgtggacagaagatcatttaccgattatttcacgagtggaacatattccgaattatttcattgccgctggacatgaaggtgatgggattagtcttgcagcagttactggaaaagtaattgaagagttattaaatgaaaaagagacaattattcctattgaaccacttcgtttgagtcgttttacagaaagggtgttaaacggatgaggtcacaaagagtctttacgacgattgatacacacacaggtgggaatccaacgaggacattaattagtggacttccaaagttgattggagagacgatggcagagaagatgttacatatgaaaaaggagtatgattggattcgaaaattgttaatgaatgaaccgcgtggtcatgatgtaatgtcaggagcattattaacagacccatgtcatcctgaggctgatataggtgttatatacatagagacaggtggatatttaccgatgtgtggtcacgatacaatcggtgtatgtacagcgttagttgaatcaggtttaattccggtagttgaaccgattacttctttaaaactagatacaccggctggcttagttgaagtagatattgctgttcaagatggaaaagcaaaagaagtatctttctgtaacataccagcttttttattgaaaaatattactgtacaagtgaaagacattgggactatagaggctgatattgcgtatggagggaatttttatgccattattgatgcgaaatcagtagatctagaattagtaccagaaaatgcatctacaatcatcgataaggcgattcatataagaaacacaattaatgagaagtttgaaatcactcatccagagtattcgtttataagaggattaacacatgttgaattttatacagatcctactcatgaatgtgcgcatgtgaaaaatacagttgttgtaccaccaggcggaatagatcgatctccatgcggtacaggaacatctgcgaagctagctgtattatacgctcagaaagaaatcgaaattggtgaagagttcattcatgagagtatcgttggttctttatttaaaggatatgtcatgaatacgacacatgttgaaaatattgaagctgtcataacgaaaattacgggatcagcttggcttatgggtatgcatagatttttttacaatgaaatggatccacttaaagaaggatttttgctaattccgccgatggaacatgaaacggaggatataaaatgaacattcaaaaaatgtatacagcagtagacgtacatgtaaatggcgaggcatttcgtgtaatgaaagacgtaccatgcaaatactactacagtttggagcaattaaatgaacaattttcaggtgaattagcagaagagatgaagcttttattaaatgaaccacgtggttttatcggtttgaatgggtgtattgtcgttccatctatctataacgaagtggatgcagctgtattattttttaatcatgaaggttcggttccgcttcattatggaggcattgttgcagtaataacgatgttactcgaaagtgggtatttaaaaaagagagagtccaatcaatacaaaattgaaacgttatctggaatatttttagttcatgcgtatgtagagaatgatgaagttatatcggtttcgtttgaaagcaaactatgctatatgattgagggaaatttacaggttggtaatgtaagttattctctcatacaagcagataaagtatatgcagttgtagagaaaggtgcgtattcgccagaaattcgcatggaaaacatttctgaattgaaaagatggggagaagctacactacagactatacaaaaacagtcgctaataaaaaggcttattttagtagatccttcgcaaaaagaaaagaaccatataaaatcgattacatttcatgaagataactttatcgtacattcgccaggttttgtttctactattgtttcctatgttcatgcgttatttaaaaatgattatatggcggataaaccttttaaaaatgaaagtatatttaatagttttataactgtggagaaagtgaagaaggaggaactaggatacattttccgttttgaaagtagagggtttattacagggatgcagacgtttctattagaccctacggatccgtttccggcaggtttcttattaaaataaaatgtgataaggagagataaatatgcaaaaaattaaaggggcatttccagtattaataacaccgatggatgaatttcaggaaattaattgggatggggtaaagcaaaatgtaaattactttatcgaacaaaacgttgcaggtatcatcattaatggaagtacaggagaatttgtaagtttatcaaaagaagaacgatttaaaatggtagcaaccgtgttgaaagaaattgatggccgtattccagttattgttggaactgcagcagagacgacgaaagaaacaattgaatatacgaaacatgcagaagcgcacggagcggattgtgcattaattataaactcttactattgtaaaccgaaggaagaggagatttattttcattttaaagaaatctcaaactctgtaaatataccaattatgttatacaataatccatttacttctggtgttgatatgagtacagagctaatgctccgtattggaaaagagtgtgaaaatgttacacatattaaagaatctagcggagatattcgaaaagcgagagatttagtaagacaaagtgaaggggctttccaagtcttctgtggttctgaagatttagttatggaatcatatttagttggtgcctcgggatgggtttcagtagcaggaaatatcgttcccggtctcgttacaaaaatgtatgagcattttcaaaatggtgaattagaaaaggcgtgggaaataaacgatgctattttaccactttgtgagtttcttgaaggatcagggaaatatgttcaaatcgttaaacgttctatggaattacatgggcaagcgggaggaccttctcgctatccaagactagggttaactgtagaagaagatcaaaagcttcaaacgattttatcaaatattgcagctcatgcagctgtttaaataaggaggagaacataatgttaaagacaaatattgagctgaaaccaaaagtggaagcgtttttaaatgaagaaattaaaatgtttattaatggcgaatttgtttctgctattggcggaaagacgtttgaaacgtacaatccagcaacagaagaggttctagcagtcgtatgtgaagcgcaagaagaggatattgatgctgcagtaaaagcggcaagatctgcatttgaatctggcccgtgggcagaaatggctactgctgaaagagcgcatcttatttataaattagcagatttaattgaagaacatagagaagaattagcgcaactagaagctttagataatggaaagccatatcaagtagcacttgatgatgatatttcagcgactgtagaaaattatcgttattacgcaggatgggctacaaaaattattgggcaaacaatcccgatttcaaaagattacttgaattatacgagacatgaacctgttggtgttgtaggacaaattattccgtggaattttccgcttgttatgtcttcttggaaaatgggagctgcactggcgacaggttgtacgattgtattaaagccagcagagcaaacgcctttatctttactatatacagcgaaactctttaaagaggctggatttccaaacggcgttgtaaactttgtatcaggctttggtcctgaagcaggggctgcaattgtaaatcatcatgacattgataaagttgcttttacaggatctactgttacaggaaagtatattatgcgtcaatctgcagaaatgattaagcatgtaacgttagagcttggcggaaaatcaccaaatatcattttagaagatgcggacttggaagaagcgataaatggtgcattccaaggtattatgtataatcacggtcaaaattgtagcgcaggatcacgtgtatttgttcatcgtaaacattatgaaactgtagtagatgcacttgtgaaaatggcgaacaacgtaaaacttggagcaggtatggagaaaggaacggaaatgggtccactcgtatctaagaaacaacaagagcgtgtgttaaattacattgagcaagggaagaaagaaggtgctacagttgcggctggtggcgaacgtgcgcttgaaaaaggttatttcgttaagccaactatattcacagatgttacagacgatatgacaatcgttaaggaagaaatatttggaccagttgttgtcgtacttccatttgattcgacagaagaagtaattgaacgagcgaacaactcatcctatggccttgctgcgggtgtatggacgcaaaatatcaaaacgggtcatcaagtagcaaataaattaaaagcaggaacagtgtggattaatgattataacttagaaaatgcagctacaccatttggtggatataaacaatctggtattggccgcgaattaggttcatatgcgcttgataattatacagaagtgaaaagtgtttgggtaaatataaagtaatagggcgttttactgataaaaattgagggatgaaataatgaaagatgcggacaactagaaagtttgataatagttgtccgttttttttatatacaaaattgcttttccaaagaatgataagggggatttggatggagaatttagtagaatggttagtagggcaagtgtggagtatcggtttagttgtttttgcattaggggcaggcgtatatttcacgattgcaacacgctttttgcaaatccgttattttaaagagatgattaaactattatttgaaggaaagagttcagagacgggaatatcatcttttcaggcattttgtttagccttatcaggaagagttggaattggtaatattgcaggggtagcgacagcaattgctttcggcggtcctggagctgtattttggatgtgggtaatggctttgttaggggcagcgagcgcgtttgtagaatcaacattatctcaagtatacaaaagtaaagtagggaatgaatatcgcggcggtactccatatttcattgagaaaggtttgaaaatgaaatggtttgcagtcattgtagcagtagttgtaacactttcatatggcgtgttattaccaggtattcaatctagtagtatcgcagttggatttgaaaactctaatggtattagcaaatatataactggtatatttttagtcgtgttactagcagcaattatttttggtggtgtaaagagaattgctggcgtttctcaaatgcttgttccatttatggcaattggttatgtaattgttacatgtatcatattaattgcgaatgtaacggagattccaagtatgtttgctttaattttctctagcgcatttggtgtaaatgaaatgtttggtggaattgttggtgcagctattgcatggggcgtaaaacgcgctgtattttcaaacgttgctggtgtcggagaagcgacgtatagttcggcagctgctgaagtatcgcatcccgcaaaacaaggattagttcaagcgttttccatatatatcgatacaattgtcgtatgtacagcgacagctcttatgattttaataacaggtatgtataatgttatacctgaagggaaaaccgccattgtacaaaacataggaaatgtggaagctggtccaatttatacacaacaagcagttgaaactgtgataacagggtttggtccaatatttatttcaattgcgattttcttttttgcatttacaacgttactcgcttattactatatcgctgaaacgacacttacttatttagatcgtcaactgaagtatggctggttaaaaccagttttgaaatttggatttttaattatggtttacatcggtagcgttgaatcagcgtcgcttttatggaatcttggagatttaggaatcggtagtatggcatggttaaacttaatcgcaatcttacttttaagtaaaaccgcattaaaagtgttaaaagattatgaaacgcagaaaaaagaagggaaagatccagtatttaatcctaaaaatgtggggattgaaggattaacattttgggaagaaagaagtaaagaggttgaaagaaaaagttctagagaaaaagttattgtcgatgataatttaaaattataactcaaattaattgaaaattcttaatttaaaagaaggtatattgcctccatttcatcacatactacaataagtatggataatatgactggagggaataagatggaacatgagcaacatagttcgataaatgatattctacatcattataaagaaggtataggtagttttacaaatcaaattcctgaaatcgctgagacatataatgcgttcacgcaagcttgttttcaagagggttctttaacaaaaagagaaaaacaacttattgcattaggaattagtttagcaacgcaagatgagtattgtacaatttatcatacaaaaggttgtcttgatcaaggatgttcggataaagagattctggaagcatgtggtgtttcagcagcatttgctggcggagctgcgatgagtcaagcggtaactttagtgcaagagtgtttaacagaattgaaaaatcaaaagcattgaataaaaaaacgttttaaactttatgtttaaaacgttttttatgtgaaattaaatttaagtataaaaattatctaggatgggttcaatttatggttatacaataatggagaattttaaatttagtaggaatgagaaataaaaactatttatttagttttaaggttttgtaaaaagcttcaattgtttcatataatcaatagcttttgttttgtttttctgtttagaaacataatgtgcctcattaaaatctctatagtaactgttaactacttcttcagaaagagcaccgtcagatatagctcttttaaccgcgcagtttggttcatttgtatgtgaacagttagaaaatttacatctcatagaaatctcttttatatcttcatagccaaaatcaaaattcctctcaaggtttatcaagtcaaatcctattttactaataagaaatccctccacttttgaaagagtcttttagaaacatacatacaaattttatcgttttcaatttgtattcactttaatattctatatcttcataaatagatttttctacatcaggaagaactgtgtatatactcttaccgattaaagcttctaattctttcttaatcgcataaaaccctttccaatgtaaagatgtatgagatgttgtaccatgacgcaaaccaacagaaattaatcttctttccagcgtagtaaagccatccgcatcagcaagagcgtcacaaagagtaattactttattgtataagtcgtagttacaatgttcatttaatatttcaactaatcggcttctcatatggtcaggaacgagactccattctgctgcgatatctatatgttcatttttgcatgggaatgagtgtgtcacacaaataacagcgtttcctgtataccctaaatcattcatatacatataaccatcataggaatgaatgaccgatttggtaaaacctttgtatcttccgatatcatgcaaaagggcagcgttatatgctatgtcagcatctagcttgtaccctttttttataagttctataattatgttttcagttgcatgagcaacatgtagtgaatgttcaaaccaagggcccgggttttgttcatatgcccattcgagtaattcttttgcgtacattctatctaatatatatttcatatcgttatcctttcacaaaaaatcatatcttaactataaattcctcttattatttcattattccttctttaaaaattgttacaatgaaacaaaagggggaaaagtaatgcgaaatttagtaattgaagaaattaagaaactagaaaatgatatagaagaactttcgaaacttttgaaaatggttgtaaatgatggggcatcaattggttttttgcctccactggaacaaaaagatgcaacaaagtattggcaaacagtattagcgccagaagtgatattgtatgtggctaaaataaacaacgaagtagcagggagtattcaattacaattagttactaagcctaacggaattcatagagctgagatttgcaaattaatgactcatccaaactttagacgaaacggtattggacgatcgcttatgcaaaaagcagaggaacgagcaaagcaagaaaacaggtctcttttagtattagatactagagaaggagatccttccaataaattgtacaaatcactagactaccaagaagttggaacaataccagggtatgcaatttcttcgaatggaaagttagatgctacggttctttattataaaaacatttaagttataatcaaacggggagagtgcttaattattagtaagtgaataataaacgactatttttaacaccgtctatatttttctggcggtgttaaaatagttaattataatctaattaacgcactaaatgaatttgagaaagtttttagagggttcttttagtaatgattctcgtcttataataaatgtagagaagatgactagccgactatagttattttcgctttattatgggaaggggatgaaagaatgaaaaagaatagtttacaaaagatgaagaaagttattttaagtggtggcgtattacttacgggattattaacatttgggttttcagaaaaggcttcagctcatggatatgtagaatcaccagcgagccgatcttatttatgtaagcaaggtgtaaatgtaaattgtggaccaattcaatatgaaccacaaagtgtagaagggataggtggatttccacaactaggaccttctgatggacaaattgcaggggctggtcattttcccgctttagatgttcaaactgtagataggtggaagaaagttacgttaaatggcgggacgaatacattcaagtggaaactaacggctcctcatagtacgaaagagtggaaatattatattacgaaaaaaggttggaatccaaataaacctttgacgcgatcagatttagatttagtgccattctatgtaaaaaatgacgggggagctagaccagggacaacagtaacgcacgaagcaaatgtaccaactgaccgtagtggataccatcttattttagctgtttgggaaattgcagacactggaaatgcgttttatcaagttatagatgtaaaccttttgaataatggcttatcctcaaattttgcttttaacaatgtagtgcaagctcctacactattttaattgaaacatacatttcgatcatctaattcattttagatgattttttttatgaaaatgatgaaaaatatagaagaaagtgcaattatttataaaaaaatatgctttaaatattgtcatatttgcttctttaagatatccttttcatgaagaggtggaaaacatggaaaaagtactagttttcgggcataaaaacccagatacagatgcaatttgttctgcaattgcttatgcagaattgaaaaaagaattaggaatgaatgctgagcctgtacgtttaggcgaaatcagcggtgaaactcaatttgcgttagactattttaaagtagaaggaccgcgttttgttgagacagtagcaagcgaagtggacaacgttattttagttgaccataacgagcgtcaacaaagtgctaacgatatcgaatcagttcgtgtgttagaagttattgaccatcaccgtattgctaactttgaaacaagcgatcctatatactatcgttgtgagccagttggctgtacagctacaatcttaaacaaaatgtacaaagaaaatggcgtaacaattcgtaaagaagttgcaggtttaatgttatctgcaatcatttcagattctttactattcaaatctccaacttgcacagaacaagatgtagcagctgctcgtgaattagcggaaatcgctggtgtagatgcagataactacggcttagaaatgttaaaagctggtgctgacttaagcggaaaaacaatggagcaattaatctctcttgatgctaaagaattccaaatgggtaatgcgaaagttgaaatcgcacaagtaaacgctgttgatacaaacgacgttcttgtacaccaagcggaacttgaaaaagtaatttctgcagtagtagaagaaaaaggtttagacctattcttattcgttgtaactgatatcttaactaacgattctgtcggtcttgcgatcggtaaagcagcaaacgttgttgagaaagcatacaacgtatcactagaaaacaatacagctactttaaaaggtgttgtatctcgtaaaaaacaaatcgtaccagtattaacagaagcattccaagcttaatcgtattgcgtacagatgaacagtaaggacaagtagtcagattggctatttgtccttttttatttataataagcagaaatttttaacttttaaacagtcgcattgtgtatgcttaatgatatggaagtattgaaaagtaaattacaggggctttttgaaaaaatattgcatctgtttcaaaattagagagctggatttcggaggaactgcgtttaaacgctgaaatacagatgttgcgtttaactttttagaagaaaggatataaagttttgattaacgaattaaaataaggatagcgttagctatccttataatcgtttattcgtaagattttttcttgtttatataaaatgtgattatcgtagtaatgaagaaaataggtatcgcatacacttgcccaacaaataacttccagccgacataattatagccttcagatgctgggatgataacggaaataacgcaaacgataaaatagactaatagtgcaggaataatatttttcatttttatgaacctcctttattgttttattaatacatacttgcattataatttagtttcattattttgaagaaaaaatgaaaaattttttatggtattataatatttgcaatgagagtaatctatagtacgcatatggtaaaatgtgtaattttaactttcagaattattatatagtatctcgagaaaaaaatgtacaaaataacgaattttatttaccaaagtaaagggagtagaaatatatatgaaaaggctatgtataattccatgcggaaaaaagaaaatttgggataaacattcagactacggaccgatggaagcaaaagatgtatatattagtccgttcggaaaagcatgtcaggcgtacgcaactatgtttttcgaaaactgggttatattatcagcgaaacatggatttttaagaccaagtgatattgtattagaaaactatgatcttgcatttgattcaaaaagcgatgaggtaataagtatagagcaattacaaaaacagatggtagataaaagtttactacagtttgacgaaatcgtcttactagcagggaagaagcataaaaaagtagtgacaaagttatatccagaagaaatgattacatatccgctagaggggtgtaaaggaattgggtatatgttgcagaggttgaaagaagctgtgaaggaaggggaggaaatataggtgtagtttcagtgattttaaactctatttatttagggagctgaaaagtaaaatagagtttttaggcatcgccgaaagggtgatgcttttttgttcgtgtcgtcattcatgtaaaagtaatttagagaataaatcattcgatttatgaagcgatagcttttttatatcgaaaacaaattgcataacttttagaaaatataggacgtatgggcacagttaagattgtaagtgggaatagcaataagacaagttttgaataagatattaagaaaggagatgttgatgaataatggctagatatagtttgcacggaggacacaatagtattgttcaaggtgctaatttcgggaatcggaaagaacacgttctagataggcaagttaaagatgccgtggcggctaagttaagagccctaggacacacggtttatgacgatacggacgaggtaggggcaactcaatcacaaaatttaaataatatcattcggaatagcaattcccatgctgtggatttagttatttcttttcatcttaatgcaagtgatggaaatggacagggtgttgaggttttatattatgatcagaaagatttggcggctaaaatctcagctcaactagcaaaagatattggatggcgtgatcgaggtgcgaaacaacgtacagatttagcagtattaaatggaacgaaggcaccggctattcttattgaattagggtttattgataatgaatccgacatggcaaaatggaatgttgataaaatcgctaattctattgtatttgctcttacaggacaaactggaggaggtgcagcgaatttgctcaaagtaaaaactggtggtgtagcatttagtaatttacaagatttggctcaagctatggttgatgcgggtattgatggacaaattgtcgttcaaaaagatggcattggttatgctataacgaatggctatccgtccgggaatatcgataaatttacagcttggttagatgcacgtaaatggtactatgagtacgtgagataaaacgaaaattggtttgattaaaaactaaaaattgtcttatttttagttaacaagtatattaagtaactataaaaatatggacaatttatatgtaaattagtacacaaaaccacctgtcagaaaggtggttttatttatcaagctatttgcgggaagtaaaattctcacctcaaaattcggatgaagctaagaaattaggtgggaattacactgctcgtagcctcctactaattatcgtttcactttatatagtttagagttttgtaaatctttacttattaaacccgtaataatattttgttttctcaatacataagccgaattttaaattattacccaataatataatacctctcatactatttattagttgataataacaaaaaaacaagctttgaatataataatgaaaaaggagatgttaaataatgggttatattgtagatatttcgaaatggaatggcgacattaactgggatatcgcagcaccacaattagatttcgtaattgcacgtgtgcaagatggttcaaactatgtagatcctttatataaaaattatgtacaagcaatgaaagcaaggaatattccgtttggtaattatgcgttctgtcgtttcgtttcagtagaggatgcacggatagaagcaagagacttttggaaccgtggtgataaaaatgcaacagtttgggtagctgacgtagaagtaagaacaatgaacgatatgagagcgggtgcacaagcttttattgatgaattacgcagattaggagctaagaaagtcggtttatatattgctcatcatatgtatgctccatttggaatggaaaatgtcaattgtgattttgtatggattcctcgttatggtggtaacaaaccggcgtatccatgtgatatttggcaatacacagagacaggaaatgtggctggtatcggcaagtgtgatttaaataagctgattggaaataagccgttagcttggtttacaaatcaaattgttgagccgataaaaaaacaagaaggggttggaattatagtgaataaatatagcaaagtagttacttatgaatttggtgtaaatttaatttctgacatgattcaaatgatggataagcttggatatacttctaaaataatatctcgtggagataaccaagggcttgtgtatttcgaaacagattatcgtcaagggaacgaactggacaaagcaactgcttggttagatatgaaaggaattaaatatttttatacaaaagagtagtttgcaaaaataagagccgtcatgtgacggtttttatttttatttaatcttttaactctacttataatatggagaaaatagactaataaacaagcctttgtatactttcaaacatagaatatgatgaattctatcaaggaggaagcatatttatgagaaatacttgtcattgtggacattttcaagattgtaataaattttgggatgatttaatgtttgggagatgtagatgtaagcgcaatgattttcacgagtgttgttgcaaagagaaaccgaagtgtgagtgtgaaaaatgtcattgtaaaacaaaagcgaaatgccattgtaggcatgaagaggaagggtattaataataaaaaagagtacgattggtcatctccctgtcaagtagacagaaataaaaagagtattatgccacggccttttcccgatattctatcggggaaaggccaattcatggatattttgaaaatcgaaacgcctagttaatttagctaggtgtttttttatatggccataaattctttatcgaagtagcacttgtccattaagttgtttacaatcccgttgaaataagcgaatttaccctttttcatttttactccggatttaattttcataacaaattctttaatagcttttaagccaatagctaactcttgttctttagtaaatgctgtatcacctgttgtatggttaacgattttattacactgtcttacgaccttccacagttcttgaattgttttagattcactgtaaaaagagccaactaaagaaataaaacgctctggtacccaatgagcaacaaagtcagcttgttccatattctcttttggattattgctattctcattactattacgtttgtttatatcttttatattttgttttaaggaaacaggttttgttttaatggtaggacactttgtaggacgttcaccttgtgtcttgttggacacttcttccacaataggttgaataataatagcgttagaagtttgaagcatatcttttttacgtttcattgccacctgtttaatcatctctagatccacaagcttcttcattaaacgttgtacagttttatatgaaacttccattttttcagcgattctgtttttgcacaggaaactaacacctacatatttgcagctgtggcgctttaaaatttcaagtaatgtaatgagtttagattttacatctgtacgcttaatagacatacggatagtgtctctgtatgcacgtatagctctatttagttcgtccacatctttgaataatgataagttgcggaaggcttctttagttgcgataacatcaatacgtttctttttcataatgtaggcccctttgcatatacaaaagagcaacagaatgccaagtgtaagcaaactgttgctaaggagcccttacgtactgtaaaatagttcgtaagagtacagcaagtgtttgcctagatggattaggcggatggtatatagagtgttggtcgcactttatatacacgctgtgctcttttattgtagttatatagtgtttggtcaattgatgactgggccacagcttttagctcatttagcacaaattcatgtttggtttaaagaatatggggtaaatattaaggaataagggaaaagcggcttacaattatgtaagccgctttttattaaagaaattatcatataaaattcaaaatcaccttataaataatacttaattagaattattattttgacgtacttattattacttgttataattggaaacaaacgttctgaaaaagattctcatttataaaattgaggtgttatatagatgacaaagaaaagaataggtttactcgtaatggcgtatggaacaccagaatcattagacgatgtagaggcatattatacacatatccgtcacgggcgtacgccatcagaagaagcgcttgaagatttaattgggcgctataaagcgattggtggaatttcaccgcttgcaaaaattacgaaagaacaggcgcataaattaacagattcaatgaataacatatttacagagtatgaatttacttgttacttaggtttaaaacatattgcaccatttatagaagatgcggtagaagaaatgaagcgtgatgggattgagcaagcgattagtatcgtattagcgccacattactctacatttagcattaaagcgtataatgaccgtgctattcgtctttcgcaagaaattggtggtcctgttattgaaccaattgaacaatggtatgatgaaccgaaatttatttcgtattgggcagaccaaataaaagagacgtttacagaaattgataataaagagaaagcagtcgtaattttttcagcgcatagtttgccagaaaaaattattgcaacaggagacccatatgtagaacaactaaagcatacggcagatttaattgcagaagctgcaaatattcaaaactatacaacgggttggcaaagtgctgggaatactccagatccgtggattggtccagatgtgcaagatttaacgaaagatttatatgaagagcatgggtacgaatctttcgtatattgcccagttggttttgtagcggagcatttagaagttttatatgacaacgattatgaatgtaaagttgtaacggatgaattaaatgccaaatatttcagaccaaatatgccgaatgcacaatctgcatttatcgactgtttggctgaaattgtttccaaaaaagtgaaggaaatagttgacaaagatttagttttaaataataattaatttataataattttaaataaataatgattactacgaaagaaagaggaggatccccctagatgaatccaaataatcgcttaacaacaaaccaaggtgctccagttggagacaaccaaaattctcgtacagctggtcgtcgtggaccagtattattagaagactatcatttagtagaaaaacttgcgcactttgatcgtgaacgtattccggagcgtgttgtgcatgcacgtggtgcaggtgctcacggtgtattcgtaacgaaaaatagtatgaagcaatatacgaaagcagcatttttacaaaatgaaggaactgaaacgcctgtatttgttcgtttttcaacggttattcatggtcaaggttctcctgaaacagcacgtgacccacgtgggtttgctgttaaattttatacagaagaaggaaactacgatatcgtaggtaatcatttaccagttttcttcattcgtgatgcaattaaattccctgatatggtacattccttaaaaccagcacctgatacgaatattcaaacgccagatcgttattgggatttcatgacgttaagtccagaatctacacatatgatgacatgggtattttctgattacggtacaccagcaagctatcgtgaaatggagggtttcggcgtccattcatttaaatggattaatgaagaaggtaaaattgtttatattaaataccactggaaaccacagcaaggtgtacgtaacttaaatgcgaaagaagtgcaagaagtacaagggaaagacttcaatcatgcaactcgtgacttgttcgatgcaatcgaaaaaggaaattacccaaaatgggatttacacgtacaagttatgcaattagatgaaatggactctttagactttgatccactagatccaacgaaagtatggccagaagatcgcttcccattaatggaagtagggacaatgacgttaaatcgtaatccgaaaaacttctttgcagaagtagagcaagtagcgttctctccaagtgcaactgtaaatggtattgagccatcggaagataaattattacaaggtcgtttattctcttacccagatacacagcgttatcgtcttggtgcaaattacttacaaattcctgtaaactgcccatacgcagctgttcataatcaacaacgtgatggtgcgatgcaagtgaatcaaaacccatctacaatcaactacgaaccgagtcgtcatgcagagaatccagttgaagacaaagcttaccgcgattcaactatgaaagtagaaggctatgtatctcgtgaaaaaattgagaaaccaaatgacttcaaacaagcaggtgagcgttaccgttcattctctaaagaagagcaagataacttaattgcaaacttaacaaatgatctaaaagacgtaaatgaacgcacaaaattattagctgtttgtaacttcttccgtgcagatcaagaatacggtatgcgtttagcgcaggcattaaatgttgatattacgcaatatgtaggaaatgctccgaaataaataggaaaagacgaccgggtttcggtcgtcttttttgtataaagttatgtcggtattttgcatgtaaaacatgtcgcaatttgttggtaaatcgatatgttgtgtcgaaccgttgatatattgaaagaaacaatcgatatatttgaaaaatcgttgatatattcaaaaaatcgctgatatattctccctaataccagattgggtattgagaaatctatgtaacaagttcccattatttaataaggctaagtggcctgagttctacgatagataggaactcaggcttttttatgcaaaaaatttatgaaatctttttggaataaaactgaggacaagaaagagggcgatttctcctaaaatagcgacaatgatattgaataaaaaggtacggaaatttgcagtgatatgagtaagaatcgcgtatttccaataagataagctcatgaaaatcactccttgtagcattttttatagtatataaaatttgtttcgtaaaagtgcgtgtcttagtttgtgatttgcgaaaaaacaaaataaattctcaatataatttcaacaattgagtaataaaacatggaatatattacctgtttaattgcataggaataggagtgtttacaaaaatattttctgaattaacataaaatttacaaaaaactaataaattgttgaaataatacaaacgtaaatatatactctatatatactttttacaaaaaaaggatgtgatgaaatgaattacatgtttacttggtaggataagattgattcattttacaaattcgaaaaaattaagtgaggagaaatgtacatgtttcaatttatgaaatcaccaatcggtatagcggttggagtagcagcggttatattagcgtcaccaaaagcgagaaaggggctaagaaagctagcggtaaaaacagtatctgcttttctcggtgcaaaagaacaaattcaaaatgctagttcagaaatggaagaagctttaccgaaagtaaaagaagcggcacgtaaagtggcagtaaaaacagtatcgccaattattggagcagtagaagctgtaccgacaactatttctaaattccaggaaaaatgggcgtctcgtgtaaatgcatatcattctgagcagagtgtagattacgaaagcatacctgttactccttagatagtaagtgattttacttcctttacaaggataaggaggatgatgatgcagagtaaattattaaaaacgagatttatacgatcgttacctggaagaattcgaattgaaatatataaactaaaatacaacttggacatggcgaacttgatagtagaacgttttcgtgacgtggaaggtatttatcaagtgagtccctctatctctacaggaagagccctgattacttacgatatcaacaagacctctctacataccgtttgtgaaataattaaactcctagaagaacaaactacaaagaatactaactttaacaatattgaagaaacgaagaaagcagaagattcttcatctagtgtaatttcttacgagaaaaaaggtgaaggtgttccattgccactagcgctttctgtcgctggattaggtgcgttcggtataaagcaactatttatgggaagatcagctttagctagaagtccagggcttttttacttgtcgggggctttatctgttttgacgggatacccgtttttaaaacgaggattcaaaaaaatggttgctagcaaaaaagtgaattctgatctagtgcttggcataggaacgcttgcactcgcactagcgcgggaaaatatcgtcgtactagcgggacttagtctattaaattatttaaattggaagcgtagtcaagcgaacataaatgaagagaaagattcgtataaagaaagaattttatccccggagattaaagcatacagtgaaaagcaatcgaaatggggcatgctttttgggggagcaacatgggcctttacgagaaatccactacgcggaatggcggttttattagctgcgaatccgaaacctgcagtttcgtctgctgagtatgcatggcgacaaggagatctcgttgcgagggaaagaggatatcttattccaaatgaaggatcattatctcaactgtcccgaacgagaacaatcgtatttgacgatgtatcgcgtatattctgtcatgaagaagcggagattagctgcatttcagaagatgaagggcaagtttggtgcacggcagcctcactgctggagaaaagtgggcatgattggaaagaggaagttgtgcaacgagcgaagcaaacaggaagaacgttaaggaaagcttttgaaatcgaagttgatgacgaagggataaaaggtgacatacaaggcattccatcctttatcgggagtaaagtatttgtgcagcgaaatggtgtagatataagtgcttatgagttagaagcgaaaggacttggcaaagaaggatttaacgttcagttcgttgctaaaggtaaaaaatgtgtaggattgttagttggatcgaaaatgacgattacacctgaattcacagaaataatgaaagaattaggtgaaaatcagtggaagtttgcagttttgcaaaatagtttacatgtaaatcatagtgttctttcgcagcacggtattgatgcaagttggcaacatagtgatgttgtagagcgtgtggagcgtattcgttcggatggggaagaagtattatttgtttgtgaggataatattgaatttccgtctgtatcttattatgaaatgaaaaatatatttcagtcaatcgcctatgcgaaacaaatcgatttattagtgaaagaacattttcgagtagcgaaaatatggaatattgccggggagatgctggctgtttggtctatattcacggcacctattatcgctttaatggcaaatgctctatctttaacgtttttatctagagcgaagcgagtaagtgagaagattttttctaataaaaagttactgaatatgaaccactcggtagctagagaaacttctacaaaatggtatgcactctcgcaagaagatgtaataaaagatttacaagtggagaaacagcaagggctaagcgctcgagaagtgcaaatgcgacaagaaaagtatggaatgaatagaattgaaccgaagcagtctgttccttggattgtttcatttatggggcaatttaaagagtttacatcgcttattttacttggagcagctggattatctgtattatcaggtggggtgtttgatggattagcgatggggacaattctcgtcgtcaatgcggtaattggaacccttcaagagcgaaaagcagaaaaagtagtagaagctttaaatcaattccgtgcgccaaattgtatagtaacccgtgaaggggaagagatagaggtagcaagtagtgagctcgtcccaggtgatgttgtctgccttcaagctggagaccgcgtacctgcggatcttcgtattatagactcttggaatttagaagttaatgaagcgatgctaacgggtgagtctctaccagttgaaaagaaagtggatgcggtaggggaagaatgttcgttagcggagcagaataatatgctctttatgggcacatccgtaacgcgcggcaaggcgagagctatagtagtggaaaccgggatgagtacagagatgggctatatgatttccttaatgaagggggaagaaacagagcctacaccactacagcaaaaggtgacgtctattagtaaaacctttattaaaggagcatttgtggctggcggtattgtgcttgtagcaggattgctacgcggtttaccgattacgcaaatgattacaacatcagttgctcttacagcatctgctgtgccagaaggtttaccgattatgattacaatcgctttaagtgcaggaatctttcgtatgcaaaagcaaaatgcacttgttcggaagctttctagtttagaaacgttaggtagaacaactgttatttgttctgataaaacaggtactcttacgaagaatgaaatgacagttaaagtcattgccacaccaaatcgtatgtggagtgtatcgggtgatggatatgaaccagttggtacaatatcggatgtaacgtcgtctaaagtcgcagctgctgtagagatggaagtagaagaagcgacttatcatgaaagtgaaaaaacgccgttagaacatccagattttgttcgcgttctgcaaattagtgttctttgtaataatagtaagttagaacatgaagacgatcagtggattgtgaaaggtgacccaactgaaggggctttattaagttttgcttctaaagcgggtgtttcatataaggatatggcatcatttgaacgacatcatgaagaaccgttcgattctgagacgaaaattatgagtgtcgtttgtaaggaaaatgaatcattgtataagttttcgaaaggatctgtagaggcgatccttactagatgtaaatggtatcaacataacggtgaaatctatccgttatgtgataaagaaaaagaggtcattttacaacaaaatgaaggttttgcagaacaggcattacgtgtattaggttttgcgtatagtaatgttgagaataatgaccttatttttgttgggttagttggtatgattgatccgccaaaacctgaagtggaagagagtattcgtgaagcgattgaacttggtgtaaaacctgtcatgattactggggatcatccgactacggcaatttctattgcgaagcagaccggtatttggaatcgtgatgatcgtgttttgacaggggtagaaatcgacaatgtaacagatgaacaattaaaagaaattgtaaaaaatacttctgtttttgctcgcgtaacaccggcacataagttacgtatagtagctgcataccaagcggactgtcaaattgtagcgatgactggggatggtgtaaatgatacacctgctataaagaaagcgaacattggtattgcgatggggcaaacaggaacagaagtaacgaaagaagctgccgatcttatattgaaaaaagatcatttcggttccattgtggaaggggtaaaagaaggtagaacgattattggtaatattcgtaaagcggttggatgtttattgacgggaaatttagctgaagtattagtgacaagtgcggcagttattgcgggaatgccgattccgttagtaccaattcaaattttattaatgaatcttattacagatgctttaccagcgatgattttagctgtaaatcctggaaacaaaacgaagcaaacgaaacgtcaagacattgttgataaagagttgtacaaaaaagttgtaacgcgaggaatactgcttggagcagggtcacttgctttattcggtatgagcttagcggctggcgtgcctcttgcggtagcgcaaacatcagcatttgcagcattagttgcaggtcaacttattcaaacattctcttggagacaagaaggatcggacgaaacgatgcgtgattggtcaaaagatcgtttctttgtgacggcgttaggaacgtcttggcttgtattattatcagctatatatgttccgccatttgctcgtatattccataccgctccattaacatttatgcaatgggtacctgttctttttgtagctggtacagtatctcaaatttcaaaacctattattaaattaatctcatataagaatgatgactcgaaaaagttggtagttaatgaactagcattattaaaaacagtgtaaaggagtaatgaaaatgatacgaaaaattgttattggatctactttagcgttagcaagtgccgctttattacctgttgtaagaaatacactccgtccacttgttgaatcaggtgcaaaaggtgtgaagtctacttttgaaacgattaaagaagaagtggaagatattattgtagaagcgaaaatggatagaatgcaaaaacaattcgagaaagaactttcttatgttgaagaagaacattctaatgaacaagagataattgaagcagctgcaaaggttgaggaaaaggaggaagtaagaaatgacgcataaagctgttgaacaagatgtggattaccatttagaaaaagcgttagtacattttgaacaggcgctagacttgagtgtaaaagcggcatctgaaaataaggcgatgcaaaaagagattgctactaaaatgggatcttttacgggagatatctttcaatccgttcgtgaaaaaggaaaagtgaatcgcatgaatataatgaagtggttcactctaccccgtttttaaacagagctgttaagtggaaggaatatagggagttattttctccctatattcatattccatgctatgtatgtcacgttagtttccgggatgttcaacaatacgaaggggtgaacgaaatggcagcatggatgatggtattagcgctaacgttttcatcaagtattgacaacttaggggtagggatttcttatggcattcgaaatataaaaattagtcatctatcaaattttattatttcggtaatttgctttttatttagtgtagtaggaatatattttggcttatggctatcaaaaattttacctgggataatgccggttgtaatcggttcgttcttattagttataatcggtctccgaatcatcttactagcaattcctcggaaggtttcggtgcaagagattgaaggagaagtgggggacactgaaataaatggcttaacgaaaaatatcggtaaatctggggaaatcggttttgtggagtctatttttcttgggattggtttatctgctaatgcgctcacaaatggattaggagcgggtttgttcggtttgaatccaattgctatttgtattgcagctgcagttggtagttttattacagtatggggcggagttgtgttgggaagaaagatagctcacgttcgcatcggtaaattcactttaggtcagtttggtacattgattagtggaacattattattagttattgcctttgctgcattttttgattaattcatagaaggtgagtgaaagtgagattactgtataaaagactgaaatattctgaattagaatcggagttacaattagtagaaagtgttttaagttcggggtattttattttattggatttaatcttcgtatctttcttattaatggtactgaccttttctatgcatcattcattttttatagcaattgtcacattcgtgagttcttacataatttgtggtagtgtatttttattattacggaaatggttaaaatgagttgaaaagctatcttaattttttaagatagcttttttgtttacaaaatgtaaacatataaaggacttctatcttgtaaatagtcgaaaaaatttgttaatatgaattgtatagagattatagttgtttttcttataataactatggttattctcgtgaataaaggggaatgagatatgtctcaagataatgaaaaaagtaatcttggattgttgttgaaaaagttacttaaggaaaagtctttatcgatgcgaaagcttagtttgcttactgaaattgatacggctactatttcaatgattgtaaatggtaagcgaaaggcaaatccgaagcatttgcaaaagttcgcggagagtcttggtgttccagttggtgatttgtttgtggcagcaggctattctattgaaacgaaacaggaggagcaatcggatattcatgtttccattaataacattgaacatttacttgaatccgcacagctctatgatcaaaagtttagtatatcgaatgtagagcagcaattaacgaattatgaacaatattcgcaaacagaagaaggcaaagaaacgattgaaaaggggtttcttgaaaagattcaaaaggtaagcagtattggcccgtttattaatgatttaaaagaattgtatgaaagatttacgaagaagaagggaacgactgcagaacttgctttaatgggaagtgcgctgatctactttatattatcggtcgatgtaattccggattatatatttccaatcggctatttagatgatgcggttgcagtacaactcgttttaaatgcactaatgaaaaggtaagatgtttatatgaatagatagataaggatatttacataccaatagtttgagataattgtatcgttatgaatatacgaaaaaggtgtaccccgtgttagaacggagtacacctttttcgttttaatttgccgattcttctacatactcataagctttctcaccatgcatcgaaatatcaagtcccatgtgttcctcgtgctcatctactcgaacggggaggaaaaagctaataactttaataatggtgtacgtcattatgattgtaaaggcataggttgccccgattgctacaagttgtttaaacagtaacgcggcgtttccgtaaaacaatccgttcgcaccatccccgtttacggcagtagttgcaaatagtcctgttgcaataccgccccaagttcctccgatgccgtggcatccaaaggcatcaagtgtatcgtcatacccgaattttgtttttaagaagaaaacggcgccaaagcataatataccaccaattgctccgataagaagggcggagaaaggtgtaacgaacccgcaagctggtgtaatagcgactagaccagaaacaactccgcaagcagctcccattgcggtcggttttgattggaagaaccattcagaaagcatccaagttagagccgaggcagcggcggctatatttgtattaataaatgcagttaacgctacgtcgtttaaggataatgcgctgccgacgttaaagccgaaccagccaaaccataataaacctgcgcctaacattgtaaatggcaaatggtgaggagaagaaccatttatgttttttcgttttccaaggaaaatagctaatacaagaccagcaactccggaagtgatgtgaacgacgtttccgccagcgaagtctagggcgccaagttcccttagccacccaccgacgccccatacccaatgagcgacaggattgtaaacgattgttgtccatagaaggataaaaataagaaaggcagaaaatcgcattctttcagcaaatgcacctgaaattaaagctggagttaaaatggcgaacatgagttgaaacatcatgaataaattgtgaggaatagtagatgagtagtctggatttggtgcgtaggtaactccgtttagaccgaaccaatcaagtgtaccgataagcccgtgccaatctggtccgaatgataaagaatagccgataacaatccattgaatcgaaacgatagccattgcactataactatgcatcgttgtactgagtacatttttgctgcgaaccatacctccataaaaaagtgccaatcctggtgtcatcaacatgaccattactgtcgccataaacataaaaactgtatctcccatatccatgatctctcctcctataatgttagaaaaaataacatatatttgttatgtttcatatcatattcgaaattaaaccgaaaatcaactaaaaattcagaagattatatatatgatgtaataaaacctaacatgaattattttgtgaggattaaaatcgacatatgcgcttcattcagaaaattggtataatattcttacaattaaagaacttgggggatgcgtgtgggaaaaatacggactaggaaactattcatttgtttttgcttagctgttgttttgtttgtaccaatacatacttttgcagacgaaaaaagagagtggcgagatgaagttatatactccattatgattgatcgcttcaataatggagaaccgaaaaatgacaagcagttagaagttggtaatttagaagggtatcaaggcggggatataagaggaattataaaaaggttggattacataaaagaaatgggttttactaccgttatgctttcgccgctttttgaaagtggaaagtacgatggattagacgtgcaaaattttaaaaaggtaaatgaacatttcgggacagacaatgatgtgaaagaacttgtaaaagaagctcatgcaaaaggaatgaaagttgtatttcaatttccacttggagaaaacgaacgacaggtaattgacgcaatgaaatggtggataaaagaagttgatttagacggaagctatgttatacatagtgaaaaaaagccgcgttccttttgggataacgcgcaaaaagatatgcaagtgataaagaaagattttcgtattatgacaaaggaggatggtgaatacaacgaaaaaatagtagaatcgttttctaaagcagatgtatcggtgaaatcgttatacgatgtgagtaaaaaagaaggagaatttgttacgtttttagatgatcaagaaacaaaaagatatgcgcgtattgcaaaagaaaatatgtattatccgccatcacgtttaaaactggcgcttacttatttgttaacatcacctggaattccgaatttttattacggaactgaaattgcattagatggaggaagtgtacccgataatagacgattaatggattttaagtcagacgaaaaatttatgcagcacataacaaaactaggtgaacttaggcaggcgagaccgtctttacgacgcggtacgtttgagcttctgtatgataagagcgggatgagcatactaaaacgaaaatataaagatgaagtaactttagtagcaattaataatacgaaagaaacacaaaaagtctccttacctgcaagtgcaattggtgaaaaacaagagttaagaggattgttgcaggatgaaattataagagagggaaacggaaaattttatctcgttttaaagcgtgaagaatcaaacgtgtataaagttaacggagaaacaggtgtgaattggttatttatctccttaatcgttggtgtgaatgtattatttattgcgtttttaattgcagttaaaaggaaacgtagatgagaagttgctggctctatgttcatgtcttcttattgtatatgtaagtttgttcggtggcgcgatagtatttattctgttgatatgaaatttcttaagagaaacgatgtgagaatgaaaacgtccctagtgagaggagggccaggttaggaaggggatgttcttcctaacctgttttttgtgttagcaccgatagggaagaatctttgaagcaatcaataattgtaactatattgattttacattacattaaaagttagagaatactcttatactaatacagtgctaaatagtaggtggaaaatggaattttacgatttgggtattaccattaaagagcttagaattaaaaaaatatatcacaatccgaattatgtcatggaatatgttcacaaagtcaaattagctattaatctaaatactttatacttattaggtgaactttactatttaaagggatggaatttattgagatttaaacaacagaatgaagaagatattgcaaataacatgaaaaaagcattatttatatttgaactaacagaaaaagaaaatctgataaaaatggttaaagaaaaatattttgaaaaccaaaatgaaaaaagccactcataattcatttggggattacttgaaatataatagaacctacagggaaaatccctgtaggttctaaacttataaactttcttctaaaatattagtgtttaatataaatttttgaataagagtttacttagtgtactttttattttgaagtctgcatctttattaaccatttatgcttctttttaactccatccaaatataattaaaattaagatggttcaagtcggaggaaggcgctttgaggtgtctttttttatgacttttatcattaactatttaatgttttttaaatgattacatgacatagtttttttgtaccaagctttgttgatacagttagacttatccgttagtgaattcgcattattagaacatcctacagtatttagggagaatgtggccaataaaaaccatagtattaatttcttcatataaccacttctaactcttttttaattaacattttttaagttccttattaattttacaatacattaaaggttgggaaatattcttatactcataaattgttacgttttggcggggggaggaattatgagttacagcgatttttaagatgactttggtctagggtgtagttactaagaaaagtaattcaaatcgaagggggaaacgtcttgaggtgtctttttcttattttcaataaggtctgctaaatacatgtataaaacaaattctacaataaggcctagtttaatcatacggtcacttgtaaagtgtgcgtatggttagaccctgttcacttagcgattttcaccgcatatacctttttctatagtttgttctcgtaatattgtctctacaagacaaaaaagaaaactcctctaattaagaggagttttctttttagcggtagttaatgaactgtacgtcgattggtaaatcagcgctacgaacagctgcgattactgcttgtaagtcatcacggctttttgctgtaacgcgtacttgatcatcttgtacttgtgtttttacttttaatttcatttctttaatgatgttgttaatttttttcgcgttatctttatcgataccttgttgaagtgttgcgcgttggcgaacagtgttgccagttgcagcttcaacttttccgtaatctaagttcttaattggaacgttacgttttacaagtttagagataagaacgtcttttacttgctctaatttaaactcgtcatcagaagttaaaacaagtacttctttttctaatttaatatcacttttacttcctttaaagtcatatcggttctggatttcttttaatgcgatattaattgcgtttgttacttcaggtaattctactttcgaaacgatgtcaaaagaactatcttttgccatagttagcacctccaaataaatttctaatctttttatgtactgtacatactaaagtatagctgaaaacgagtctagacttaagtgttttcgtacttatattcatgtaacctcattttattatagtgaattttgggcagttggacaaatataggaaaaatcatgttataattaacttttgtttggaatgataaaaaagataattttatatatatagaagggaattaaaaaatatgtatttgcaaataggatcgattgaacaggtaactgttttacgcgaaacggaaatcggatatatggttgggaatgaagaagaagaaattttcctacataaaaacgaagtggctggagaaattgaagaaggcgatacgattgatgtattcttataccttgatcaccaaaatcgtatttcagcaacaatgaaggaaccaattattacaacttatgattggaactgggtaaaggttgtagaagttattcctagtttaggtgtgtttgttgatattggtgtgtcaaaagatatactaattccagctgatgagttcccgatttatatgccggtatggccagaagtaggcgacgaattatattgtacgttaaaattaacgaatcgtgatcgtttaattgctcttccggcaagagacagtgatatgcaagaaattatcgtagatgcaacgccatctatgcgtaataaaaacgtaaacggacgtgtatatcgttcacttcaagttggttcattcatactaacggatgagcatttccgtgctttcctacaccatacagaaagaaaagaacaagtccgcatcggtcagcgtgtaacgggccgtattattgacgtaaaagatgacggtacaattaacatttcacttcttcctcgtaaagaagaaggaatggaagatgatgctgcagtaatttatgcatatatggaagaacgaggcggagcaatgccgttttgggataagagccatccagaagatattaaagaacgctttaacatgagtaaagctgcatttaagcgcgcacttggtaagttgatgaaagaagaaaaggtttaccaagaagaaggttggacgtactttaagaaataaggtggatgaaaaaagaactattctttctctgaatttttaagagaagggatagttctttttatttttaataatgtattcgctctataaggtagatattgtgaaagaagtaggcaggatggaaactaaagttatagaagaggtatgttataaagttttaaaaatatatggttaattattatgtagttttttaagtgagattttgattgtagtatttcttatgtgattcattaaaaaggctaaaagaatataagagatttatcgcagtgtttgtactgcctatcctgctatttgccgggcagtaagatcatcactgattaaagtttcattttatgtataaaattgtgatagcttttacactgtgttttgaatttttacaacgctgacagtattaaaaatataaaataattaggatgattatatgcatatttggatactaacaaattggcggaaatattataatctagaagagaagagtcatcgcatgggactacgagtaaaattcgataaagatgttgatcctgaagtgagaagagctattaaagagttttgtaaatggatacgccgagaatatttttttccaattagagtacctatttatgtaaaatcttcatataaaataaaggcgatggatggtgagttggtctatggtactttctttgaaccatttgatcgaaatgatgagccgtatattcgtatttcgacaggagattattacgatgagctagagaaaagagggaaagatgacgctttgggaggatatttgtttactattgcgcatgaactaacacattattttcaatggattaatgatataagactaacgagaattggatatgagaggcaggctactgcttattcaggatatattattgatgagtataaagaaactagagagcatccgtgaaatagaaactttatggataattggaagtatgataattagcaatgggcttgaatgaatgccctaatatttaggggctatccgggattagatatctgagttattaaacaaaaataagtgtgggtaatacgctttgacgaaaaggtgtgtatatgaaattttataacgcagtatatcttataatttcttatgatgatgagatattgaaagagaggtacgaaaatgcaagataatgtactggaacaattgataaagagtctctcggtattatcccttgaaaaagaacacgaaatagcagcagttgatttacatgatatatatgagagcactgaaagattcgaacaattacttgaaaatattatgaactcacaacagtctaaagaagaattaatagatgcgctaattgaagtggagatagaattagatcacatcaattggcattacaaaagcttgaagaaaaagttggaaatattgatgaaagattaaaaagcacaaccttatttaaaaaaataaggttgtgcttttttaatttccttgcggagaaacaagagtaaatgtatctttcaaatcactatcatttattttaatatttgccttttttaattcctcttgtaacaattttttgctgaatacaggatcagcagtacgttcttcctctaagtttttgcgaatagagttttttacctcatcgtaaggttttaaatcttttttatcagttaatttaataacgtgataaccgtttgatgattttacgggattgctaatttgtccaacatttagtttgtaggcagccctttcgaattcaggagccattgtacctgaattgaagtatccaaggtctccgcctttatcttttgatagtagatcttgtgattcttgttttgctaattcttcaaatgaagcaccagcatctagtttactctttatttctttcgcttcattttcgtcacttactaaaatgtgactcgctttaatttctggcttatagtggtcttttacgtctttctctgtaatgcttttcttaatcgcttcattcatagcaagtttgaacttaatttgatttttgaaatcctcttcatcttttaaaccattattttctaatacttttttgaattgatctccatattgtttttttactttttctacttctttatttacctcttcatcagatactttatatttttttgtgatgacgtcttgtgccatcatttcgtatagcatgtcttttccgtaacgatctttcaattgtttttcgaagttatcctttgtaatggtcgagtctgttgctgtagcgactgtagctgagccgtttttttgtccgcaagcagataacatcaatatacttattagtgcagtaataatgaaaatatgtttccctctcatgccaacacctcatccgaatatgttatcgctattgtagaatatagaagtgaacatgaagtgaatttttaatgtttttttcctttaaaatgtaaaaaagtacatcaacataattgttgatgtacgatggaatcaaaggtgatcggtctttttagagtatgcacgtttaccttgctgaatatttttttgctcttgctcatttttttgctcttgctcatttttttgtgtgcgttttgcgttattatcgcgtgcttttttgtcgttatcactcgtatgtggcatatgtatcaactccatttctaaacgttgtacgtttatcatttcctttttcgtaaagactatgtatagcggtgcatttatgaagggtaaaggtggattcgaaatggatttgaagttgaattatactgaacttataaagaagttaatcgttgtaatcatcgcaggtttattaaacgcgattgggatgaatttatttttaacgccagcaaaagtgtatgcgagcggctttgctggattgtctcaattattatcacaaatattaggtgattttttatcgattcacatatctacgggagtattgtttagcttatttaatattcctgtcgttattttagcgtggaaaaaggttggaaaggccttcaccttttttagttttctttgtgttatatttatgactctgtttctagaaatcatccctgttagagcggtttcgaatgatatcatattaaatgcgatttttggcgggattatttcggcaattggagtagggattgctttaaagtggggtgcttctacaggtggattagatattatcgccatgattttatcaaaaataaaagataagcctgtcggtacatactttttcttttttaatgcaattatcattatcgctgctggctatgtatatggatgggaaaaagcgttgtatacgctagtgactttatatgtatcaacgagaattattgatgcaattcatactcgtcatgtaaagattacagcattaattgttacgaagaatggggcagacgtaagaaaggcgattcactcgcgattagtaagagggattacaacgataccagcaacaggtgcttatacgaatgaaaataaagaaatgttaatgatggttattacccgttacgagttatacgaattagagaggattattagacaagtggacccaggtgcatttacaaatatactgcaaacagttggggtgttcggattgtttcggaaagattaaagaggaccaaagttggtcctcttttttaatgtaaattcgtaatgttttgcaattgctcttgcatttcacggagctgaactttttcagcagttgaagagtttgcgtaagcggattgcaaagcattttttgctctatacacgagatcttgttgctcagtaccgcttgaacaagatacggcattttcaacagcatctctagcttgttggaatagtaagttccccatttaaacccctccaaaagaagagttacttcttgctttttctgcctcagctaatgtacctctgtacgggaatcttgcatcatgcttcataacagcatcggctccttgttggataaaacgttttgatttgttctttttacccattcgaaaaaccccctttatttagctgaaaacaatcgacgcaatgtctcatgcgtctacttatagtatggacatttggcaggaaactataagtagggaatttttagattacaacccaagaacctcttctaaatataaagcaataccatcttcttcgttcgttaacgtcgtatggtttgcgagtgattttaattcagggatggcatttcccattgcgatgccatgaccagcaaattcaatcatttcaaaatcattatcttcatcaccgaaagcgataatgcgctcttgtggaatgttgtaatgactagaaattttttgtaatccaactgctttatttaatccgcttttcacaatttcaataatcggccaaggtgcgccccattttctatggtcgattacttccgcatgcatatccgttaaatgttgacgaattgcagtagaatgctcgtcatgtgcgtcaattaataagcaagttggatgatcgtttaaaatatttaataagtctccggtaaaaatcttaggagagccgaattcgaaaatatgttttttatcttcatcaatttcacgaacatacacatcgtccattacttccgcgtatatattttttacgccaaaatcaaagcaagctcggacaatttcttgcgctgttgctagctcaagaggagagtgatgtgttccccagtttgaatcaagaggatgatgtacgtaagcgccgttaaagtttacgataggtgtgttaagatcaagttctttatagtaatcgtaactagcacggaatggacgtcctgttgaaataacaacaatatgtccctgttcctttgcttttgcaattgtatgtttcgttcgagtggaaattattttgttgtctgttaataaagtgccgtctaagtctaatgcgattaaatgttgtttgttcataatttcacctcttataataatttttttgtatctatctgtatttccgtttttaatatgcagaaataagaggttaggctcggtgaaatcaccatagatggaaatttcactatatatccatcttacgtctcaaagtgctgtggtgtctactatttatcgttggaaattaagaaaagtcaacatctttttagaaagttcaaacaatgtttctttcattatgtacaaattgtgaaaagggttacattgctcgtgtggtgaggcatataatgaacatgtaatcttctcgtatatgtttgactctcctttgaaactagcctagagtaggttggtttctttttttttctacaagtaggaaagaaatccctgcttacgcttgtgtcattcatatatatgtacaagaatgagatgtagtactgtttcctaaacatgacagaaaagctttcttttaaaatggatatactaatgaggcaagacgtcatggaaggagaatgaagatgggacaaaatcgcaggtttcgttctggacaaaaagcgccgaatgatggcatttacgtagaaattggtgaaacgggaagtatggtgaaagatccgcaaatggtgaaattaactgccggtgaaaagtttccggataacacgaatcataaccgccagtggacatataaaagaaaaccgtaacagaagccgcaatcattattgcggcttttttgtcgttacacattgtaatttcatttaccgtattttttagcagtataatgaatgctctctttttctttttcaaataataagtttgaaaatacataggcaaaattattgtataaaaaagtcagttggcgtataatcaaatcaaaggtcaaagaaagtcaaacttttggagggctgtaaagatggacttaaatcaaatgacaacaaaaacacaagaggcgattatgagtgcccaatctttagcggtatctcatcatcaccaagaggtggatactgttcatctattacttgcattattagaagagcaagatggattagcagtacgtatatttcaaaaaatgaatgttgatatagaagcattaaagcaaggtgctgaaagtttaattaaaaagaaaccttctgtaacggggagcggtgcagaagttggaaaattgtatgtaacgagcgctctgcaacaactgcttgtaagagcagggaaagaagcagaaaaactgcaggatgattacatttcagtagaacatgtgttgcttgctttttctgaagaaaaaggcgatataaatcaattatttacaagattgcatattacgaaagataacttattacagtctttaatgacagttcgggggaatcaaagagtgacgagtcaaaatccagaagcaacttatgaagcgttagaaaaatatggtcgtgatttagtggcggaagtgagagcagggaaaatcgatcctgtaatcggccgtgatagtgaaatacgacgtgtaatccgtattctttcacgtaaaacgaaaaacaatccggttttaattggggagccaggtgttggtaaaacagcaatcgttgaagggctagcccagcgtattgtgaaaaaggatgtacctgaaggattgaaagatagaacgatttttgcgttagatatgagtgcactcgtagctggtgcgaaattccgtggtgagttcgaagagcgtctgcaagctgtattaaatgaaattaaaaagagtgaaggacgcattttattattcattgatgaacttcatacaatagttggagctggtaaaacagaaggagccatggatgcaggaaatatgttaaaaccgatgcttgcgcgtggtgaactgcattgtatcggggcgacgacgctcgatgaatatcgcaaatatattgagaaagatccagcgctagaaagacgtttccaacaagtattagcagaagaaccaactgttgaagatacaatttcaattttacgtggattaaaagaacgctttgaaatttatcacggtgtaaatattcatgaccgtgcgattgtagcagcgtcagttttatcagatcgatatatttcagatcgattcttacctgataaagcaattgaccttgttgatgaagcgtgtgcaacaattcgtacagaaatcgattctatgccaacagaattagatgaagtaacgcgccgcattatgcagctggaaattgaagaagcggctcttggaaaagaaacggatcgtggtagccaagagcgtctaaaaacattgcaacgtgaattatcggatttaaaagaagttgcaagtggtatgagagcaaagtgggagaaagaaaaagaagacattcacaaagttcgtgacttacgtgaacatttagaacgtctgcgtcgtgaattagaagaagcagaaggtaattacgatttaaataaagcagccgaacttcgtcacgggaaaattccagcaattgaaaaagagttaaaagaagcggaagaaatgggcgcgcataataaacaagaaaatcgtttattacgtgaggaagtaagtgaagaagaaattgcagatattgtttcacgctggacgggtattcctgttgcgaaactcgtggaaggtgaacgcgagaaattattacgcttagagcaaatcttatcagagcgtgtcatcggacaagaggaagcagtaagcttagtgtcagacgcagttcttcgtgctcgcgctggtattaaagatccgaaccgcccgattggttctttcatcttcttaggaccaacaggtgttggtaaaacagaacttgcaaaaacgttagcgcagtctttattcgatagtgaagagcaaatgattcgcattgacatgtctgagtatatggagaaacacgcagtgtcacgcttaattggtgcacctcctggatatgtaggatatgaggaaggtggtcaattaacagaagcggtaagacgtaaaccatattccgttgttttattagatgaaattgaaaaagcacatccagaagtattcaacattttattacaaatgttagatgatgggcgcattacagattcgcaaggtcgtacagtggactttaaaaatacagttattattatgacttcaaatattggatctgctcatttactagatggattagaagaagatggttcgattaaagaggaatcaagagatcttgtaatgggacaattaagaggacatttccgccctgaatttttaaaccgtgttgatgaaattattttattcaaacctcttacaacgaatgaaattaaaggcattgttgataaaattgtaaaagaactacaaggtcgtctagctgaccgtcacattacagtagaattaacagatgcagcaaaagaatttgttgtagaagctggtttcgacccaatgtacggagctcgtccattaaaacgatacgtacagcgtcaagtggaaacgaaattagcacgagaattaattgcaggaacaattactgacaatagtcacgtagttgttgatgtagaaaataacgaattagtcgttcatgtgaaataaaaataaaaaagagttcggataaaatccggactctttttttagtgttgttctactggctcgtttggaattgcagctgaaattgctagtactaacacagcaagaacaactgagaaaatagacgcttggttaaagtcgtatgtaccgccagtcatagagccgattacatagctcatcatatgtacaagtaagaacgaccaaattaatgcccaaatgaaacgcatattttacacctctattcgttcaatctgtccttattgtaacacaattgaaaaaagaatatagaaaaatatttgtagatttttcaacgcaaatttgcattccgttcatacattataaaagagtacttttatatgtttagaaaataaggcgggggaaaaatgagtattacggaacgttttttttacttagaaaaagaaccatgtgtcatttatttaccggagaagccaaatggattttctgttatgctcctcggtgattataactactttattgagaatggtacaagtttatggacacaacatgcgggtaaatcttattttttacatggtcttattgaacaaggctacacggtcttttcctctaatttatacggaagacattggggaaacgatcaatctgttcgtctggcaaaacgtttatatgatgttgttttgagaaaagagacgttaaatgcgaaaatgcacattatggcagatggtatgggagcgcttgtagcacttgaaatgatgaacaaatatcctgaatgtattcgttctgttgttatgctaaatccgtgtttagatttaccagaatatgtaagttttgagaaagagcataaatttttttacaagagactcgtgaaggaattaagtttggcgtatgatgccaaagaagaagaattagaatcaaaaataaataagaaatcatttacgcttcttccatcttgtgtacctgttaaaattttcgtatcaacacaagaaaaaagaggaagaaaacagcagttgcgtagatatgagaaaatgaggcaactaaatcaatgtgatacttctgtcttgttccatctgcaagatgtgaaatataaaatggttaggcaaacgactgatttctttaaaaaatatgaagaagaattatgaagctcccatatacataaatgaggagctatttgtttcagagggaaaggattggtggtatggaacgcgtgctgataataggtgcacttacgtttgtaggttatcaccttgtaaataaaatgattgcagaagaagtggaagtctatggtcttgattttgatgaattcgatagtatgaccaaaattaatgaagagaagttattattaattgggcgaaatgcgttatttacgtattattcgataagagatgaagatggatggagatcggttgaggaagagagattcgatactgtttatttttgcttatatgagccaaatcagcaaagtggatttcggaatgaaagagtcatattacaatatttaaagcgaattataagaatgtgtgaagaacaaaaagtgaagttaaatttaatttcttctattgaagtaggcagtacagatgaatccgaaaataagcgcctatttttgaaagtagaagaaggattgaaaaaagggaatttacaatatagtgtatttcgagttccaacattatatggaccgtggcaaccgtcctttatgatgtttcatcagcttattttatcagaattagttgaaaaagagtgccgttgtacgattgaggaaaaggggaatgatttactttacgttgaagatgtatgtgaatacttatgggaacatggaacgaacggggcgcatcttggtatatacaatttacttagtggtaaacagtcattatgggaaaaaggtatgaatcttttacgcgcggatgataaagtaaataaaaataacagcgaagtaagagatgaggctatcgaagtaatttcgataaaaagaaatactccgttagaatacggtttaaataagcaactggcacacatgaaaaaatataaagagttatacgaagggtagtacgcgtgttacactattgtatgtgaaagttttaatggagaggaagagtataatatgaacgaaaaaagcatgcagtttttacaaatcgcaatgaagcatttaccggaagcaaaggcaattttagatgataatggaattgcacttgatatggagaaggcacagccggtgttagagttgttaatgaaagttatgaacgaagcttacgagcttgggaaagcagataaagaataaaaagcatctttttaagatggaagagaggcccgaaccgtggatagaagcggtcagggccttttttattctcgcctgggggaaaaccagagatatgaagaggataaaggaaaagtagtgaggagaactgtctagtttagaaggaaagcagataaagaataaaaagcatctttttaaggtggaagagaggctcgaaccgtggatagaagcggtcagggccttttttattctcgcctgggggaaaaccagagatatgaagaggataaaggaaaagtagtgaggagaactgtctagtttagaaggaaagcagataaagaataaaaagcatctttttaaggtggaagagaggctcgaaccgtggatagaagcggtcagggccttttttattctcgcctgggggaaaaccagagatatgaagaggataaaggaaaggtagtgaggagaactctctagtttagaagaaaagcagataaagaataaaaaacatctttttagatggaagagaggctcgaaccgtgaacagaagggtttgagtctttttatatttgagaggtatgtttctgtttcttttaatgaaaaataaagtggataatgcgttagctttctgttttatgcgaaatatattctagacaaaaatacatttatgttttaaaattagtaccaagtcataataattgatataaaacggagggctgcgatgtgaacgtgggcattttagggatcggaagatatgtgccagaaaaagtagtcacaaatcacgatttagaaaaaataatggatacatccgatgaatggattcgtacgagaacgggaattgcagaaagacgcattgccgatgatacaatagatacttcatatatggccgtagaggctgcaaaaaaagcacttgaagatgcaggggttagcggagaagatatcgatcttattttagtggcgacagtaacaccagatcgtgcgtttccagcagtagcttgtgtcattcaagaagcgattggagcgaaacatgcagctgcaatggatgtaggtgcagcatgcgctggttttatgtacggaatgattacagcgcagcaatttattcaaacggggacttataaaaacgtattagtagttggtagtgataagctatctaaaattgtagactggaatgatcgaaatacagcggtattatttggagacggagccggtgctatcgtaatgggagcagtttcagaaggaagaggcgttctatctttcgaattaggagcagacggaagcggcggtaagcatctatatcaagacgagtatgttatgatgaatggcagagaagtctttaaatttgccgttcgtcaacttggtgaatcttgtcttcgcgtgctggataaggctggtcttacaaaagaggatgtggatttcttagtaccgcatcaagcgaatattcgtattatggaatctgcaagagagagattaaatttaccacaagaaaaaatgagtatgacaattgaaaagtttggtaatacatcagcttcttcaattccaattgcaatggtagaggaattgcaaaatggacgtattcaagatggtgatttaattatacttgttggttttggtggcggattaacatggggagcagtcgctcttcgttggggtaaataaggactgagagaaaaaaaggagtgtattttgtatggaaaaaaagagggtcgtaattacaggactaggagctgttacaccggtcggaacagatgttgaaacagcatgggaaaacattaaaaagggtgtatctggaatcggacgacttacaagaattgatccggaactatttccagcaaaagtagcagcagaaattaacgactttgaagtcgagaaatatattgataaaaaagaagcgcgccgtatggaccgctttacacaatatgcagtagcagcagcgaaaatggcagttgcagatgcaaagcttgaaattacagaagaaaacggacctcgaattggtgtatggattggatcaggtattggcggtatggaaacatacgaagaacaatttaagatttttactgagaaaggcccacgccgcgtgagcccattcttcgtaccgatgatgattccggatatggcagcaggtcaagtatcaatcgcaacaggagcaaaaggaattaacacttgttctgtaacggcttgtgcatctggtgcaaactcaattggtgatgcatttaaagcaattcagcgtggtgatgctgatgcaatgattacaggcggagcagaagcaccgctaacaagtatggcattcgcaggatttagctcagcgaaagcattaacatttaatgaagacccagcaacggcttgccgtccatttgataaaaaccgtagcggttttgtaatgggtgaaggctcaggtattctaattcttgaagaattagagcacgcattagcgcgtggtgctcacatttacgcggaaattgctggttatggtgcaactggagatgcgttccatattacaatgcctgctcctggtggtgaaggcggagtgcgtgcaatgcgtcaagctttagctgatgcaggcctacagccagaagatattgattacattaatgcgcatggtacaagtacggatgcgaatgaaaaatatgaaacgatggcaattaaagaaactttcggtgagcacgcgtataaagtagcgattagctcaacgaaatcaatgacaggtcacttattaggagcagctggtgctgttgaagcgattttctctattaaatcaattacagacggagtaattccgccaacaattaactatgagacaccagatccagaatgtgacttagattacgtaccgaatcaagcgagacaccaagaagtaaatgcagtattaagtaactcattaggatttggtggtcataacgcagtgttagtatttaaatcgtataaataatagatgaaataaggagttttttcgcaatatattgcgaaaaaactccttatttatttttacgcctttttctcctgtagcatatacataagaaaaaggagggataaagatggggattgttgaaacagctgaatggctacatttatattatgggcggccagaaaaactttgtgagaaatttacgaagtatattccgttgccaaaagaaaggttgtatcgctttttaatttcaaaagggatgtatcgcccgattatgcgcggagaaaaggaaattaaagaattagaggaaaaggaaatttggaaagaattgagcctggagtatgataaactgaaaaactggttaaaaggtccagatgtccctgtctttattttattatcagattcctataatcgaactgtacaagaagagtataacggtagggctggattatctatgcgtcatgttattttcttattcgtatgtggacggaattcggtagaagaattaaaagtgttattagcgcatgaatatcatcacatatgcaggttacatcaaattgagacgaaagaaacagaatatacattacttgatacgatgattatggaagggctagctgaacaagcagtaacagaaaggtatacagaaaaaaacaatgcaccgtggacggcgtatctttcaaaggaagaggctatttattattggaaaaatattgtacatgaaagaataagtataaaacgaggaacaagggaacatgacatcttattaaatggctttcactcttatccgaagatgcttggctatgcgcttggatttcatattgtcaaagattgtgtaactttggaaggagaagatacactttctttattatctatagatgcaaaagaaatattgaataaagcaagtacatttcatatataaaaaaacaggagttctatttcctgtttttttagtattaatagaagaaaaaataataattagaatatatttcctcaagtggaataaagttaagcaaaaatgaacataatgattggtacaaacagtagtgaagtgaggggtagtgaatgttatatctacatgatgtatgggtaaattggtttgaaggtgaagaaaatgggtataacgtttgtcatttttacgaatggcggaaagatgatacgattgagctattagatcaagtgccattattaaaagtagatgccacattatatcattacatcgagaacgaattgttagagcttccgcaaaaaatgctggaagacgtacatcataaggcttatattcgtaaaaatcatgaacgtttgcagcaagagtattgctttgttgttacagatggaaaaggaattattgcgattgacacaattggttacaatgtaccaattcgcaaaagcagacttataccacgccaagagcagatggtatatgagatggtagaaaacgtacaagcagaaaagtatgagttccaagtagaagaaacagaaaaagaacatcacattttatcaccatcgcctttcattatgaatggcttgactcgtaaagaaagacagctaaaacaattattatttatggcgttagatcaattacatacaacgaaaaatacagcagaaattcgctattggttcacagagtgggatccatcagcatatggaatggttcaacatatggaatttgaagatatttgggttaagctgtatgatgaagcgaaaacaggctggtctgataagcatgaacaattatgcgagcgtctcgtaaaaggacagccattttttgaaaagttatgggaaatggaaaatgagcaaaaggtaaattaaaaaaccgccaattggcggttttttaattttgtagtaatccagctccagcggcaagaatgttcggtggcttcgcgccttcctgcgaggcaaaaagcgcctctacgtcaggagctccatccccctcacattctaaacgagccgcctccaccttatatgtaatccagctccagcggcaagctcttcgtgtctaagaaccttccgcataagaaggaaaaaagctccttttatgcgaaagaaccttagccagtcagagctgaacgagccgcttccactttatatgttacctacgttttctgcttagtcccattgcgttttctactttgcgtagttgtttgaatgcaacgcggtttgctttttctgcacctttgtctagaatttcgtctagttctggtgagttgattagttcgttatatttgtcttggattggacgaattgcttctacgactacttgcgctaggtcgcctttgaagtcgccgtatccttttccttcgtacattgcttcaatttcttcaactgtttttccagagaatgaagagtagattgttaataagttagagataccaggtttgttttctttatcaaatttcacaataccttcagagtcagtaacagcactcttaattttcttttcaattgtttttggttcatcaagcatactgatcattgattttggattcggatcagatttactcattttcttcgtaggttctgttaatgacataacgcgagcgcctacttttggaatacgaatttcaggaattgtgaacacttcacggaagcgtttgttgaaacgctctgctaggtcgcgtgttaattccatatgttgcttttggtcatcaccaactggtacgatttcagtgttgtaaagtaaaatatcagcagccattaatggtggatacgtaagtaatccagctggaactgaatctctacccgaagctttatctttatattgcgtcatacgttctaattctccaacgtaagcaacagattgcatgatccatcctaattgagcgtgtgctggtacttctgattgtacaaataaagtagctttttcaggatcgatgccgcatgctacataaagtgcagcaagactgcggatgtttttacgaagtccgacgggatcttgaggtactgtaatcgcatgttggtttacaatacagaaataacagtcgtgttcattttgaagctctgtaaactgcttcattgcgcctaaatagtttccaagtgtaatcgttccacttggctgaataccagaaaagataactgacataagtaattcctcctaaaattgaatgcgtgatggggggggagagaaggcaaacaaaaaagcccattcatcccaaaaactatagggacgaatggaccgcggtaccaccctaattatttcactactgtgaaatctctctaatccataataacgttaggatataacgccaaagcctactactttcggttcggtttggtgctcaaaagcccattccatactgtacaattacttgttcacaccaaccacaagctctctgaaattgcctcaatatgtactcttctttatcatcgcatacatataaatttatttattgttacttgagctcttttaatatgaaagaactaaagttttataacaaaatgttttgctgattattatatcatatgggatagtgtttgcaaactacatcaaaatagtaaagctaataagggtcgagaacaacccaaggaagatacctgtaatacaaattggatatgtccatttgaatgaatatgttttataaatacgttctttcttatctgtaggttcctcgacttcttcaattaaagagtcaatctttttgttcgtaccaaatactctttggaatgcgtaaatggttacattgaaaaaaccattttgaaatatgtataaaaaaccgccgataagaataaaaaacagtgcaatataaaacaaaatgttgacaaagttcaacaaaaattgagatgaaatgaggaatgcgccaatactagaagcaatcatcgctataaaaattagtatacaagtatgaaaaaaaactttattcaaaatattcccctccgtcaaaatattactagaattattatactataaaagctataataagtactaggattaattttttgaaaattatacgcaattaaaggtctgattttaagatgatggtagcaatgttaatgtatccctttacgaaaaatttaaaatataaatattttattaaaaattttaacaaaaaaacaaaaaactatattcacaattgttatattatatgtataatgaaaattgtagaaacttggagattattctttcaattctactttttaacaagtgagggtacaggaagtgcaattaggggaggcaacacaacatgaagaaaaagataccgttattacttgcatcaactttaactgcaagtatgttgcttagcgcgtgtagctaccaaaaagatgacgcaaaagcaaaagggaaagagaacgctacgagtagtagtaacggaaaacagattcttaatttaacagagttatctgaaattccgtcaatggatgcatcattagcatctgattcttcatcttctacagcattaaataatacgatggaaggtttatatcgtattggcaaagaccaaaagagaatgcctggagttgcagaagatgtcgaaaagctagatgatgggaagaaatacatatttaaattaagaagagatgcgaaatggtcgaatggggaacctgtaacagctaaagactttgtgtattcatggaaaagagcagtaaatccagatacaaaagcaacgtattcatacattatgttcgatattaaaaatgcagagaaaattcataaaaaagaattacctgctgaccaattaggtgtaaaagcgattgatgattatacattagaagtagaattagacaatcccgttccttactttatcgatttaacagtttatccagtattttacccactaaatgaaaactttgtaaaagcacaaggtgataaatttggtttagaggcaaatacaacattatataacggtccattcgttatgagtgattggaaacatgaacaaagtttccaattcaagaagaatccttcatattgggataataaaacggttaaaatcgaagaaatcaactttaatattgtaaaaaatacagcaactgatgtaaatttatatgagacaaacgcgattgatcgggcggctttaacgtctgaatttgttgataagtttagaaaaagcccagagttccaaacaagaaaagaggcaggggttgcttacttaagatttaatcaaagtaatcagtacttaagtaataaaaacttaagaaaagcaatttcaatgtcctttgaccgtgataacattgcaaaagttattttaaataacggcgcaattggagcttacggatttgttggaaaagatttcgctgaaggtccaaataaaaaagatttccgagctgaaaatggaaagctagttgaaacaaatccaaaagaagcaaaaaagctttgggaaacagcgaagaaagagcttggaactgataaaatcgaactagaattcttaaactttgataatgaagatgctaaaaaagttggggaattcttaaaaggtgagatggaaaagaacttaccaggtttatcaattaaaattaaacagcaaccattcgcacaaaaaaataaattagaagattctcagcaatatgatattgcgtttggtatttggggaccagatttcccagatccaatctcatatttagatatgtttgttacgaatggttctcaaaataaaacagggtattctaatcagaaatatgatgagttaatcctaaaagctaaaacagatacaaaagatttacaagctcgctgggacaaccttctagaagtagagaagatgttaattaaagaggatgcagttatcactccaatcttccaaaaaggttcagcgtatgtagtaaaaggtgccgtaaaagatattatcccaattaactatggtggtaaattaacttacaaatgggcatctgttgaacaaaaataatcttttttttccatcgtttacaagggtatatgcctatgatgggcatatgctcttattttaaaaaaataaaagtaagaatattttaaactatcttattgcttttgagaaaaacggggaggtgcttgactatgggacgttatgtattaaaacgtttcgtgtacatggctttgacattatttttaattactacaatgactttctttttgatgaaattacttccgggttctccgcttaaaaaccaggagaagctatcaccggcacaaaaagaaatcattcttgaaaaatacggattgaatgatccggtaccagttcaatatgcacgttacttaggtaacttagcaaaaggtgatttaggggtatcattccaatatgataaccgcccggtaacagacatgattgtggatcgtattggaccatcagcccaattaggtttacaagcgattatattaggaacatttatcggtttaattttaggtattgttgccgcacttcgtaataatacgtgggtagattatagtgcaacagttatttcggtactcggaatgtcggtaccatcattcgtattcgccgcattactgcaatatttcgtaggggtaaaactaggctggttcccagtagcattctggaaaggaccagagtttactgtaatgcctacaattgcattatcgatgggagttatcgcgacaatcgcacgtttctctcgtgcagaattaattgaagttatgcaagccgattacattttaacagcgaaagcgaaaggaattagccaaggcgttatcattgtcaaacatgcacttcgtaacgcgttaattccagttgtaacaattttaggaccaatggttgcggcattaattacaggaacacttgttatcgagcaaatttatgctgtaccaggacttggggaacaattcgttaaatcgattactttaaatgactatacagttattatgggaactacgattttctatagtgcgatcttcattttagttattttcattgtcgatattttatacggaattattgatcctcgtattcgtttagcgggagggaaaaaatgatgaaagatgtacaaaaattatctccagatttatttcaacaagccaatcaaaataatgttgataatgaagtcattgcccgtccaagcttaacgttttggcaagatgtaagaagacgtttattccaacataaaggtgcgatgcttggccttgtattgttagttatcattgcgctattagcgatttttggaccgatggtaagtaaacactcgtataaagagcaagatttaggtcgtgcgaaattaccaccaaaaattccagttattgaaaatgttcattggttaccatttgacggtacagatcaatatggtgttgaccaatatgaaaaacgtgatattaaagagtacttctggtttggtacagatgaccttggccgtgacttatggacaagaacatgggaaggtacacgcgtatcattatatatcgctcttttagcggcagcaattgacttagtaattggggttgcatacggaggtatttcagcattctacggcggtagagtagataacattatgcaacgtattatggagattattaacggtattccatacttaatcatcgttattttaatggtaatcattatgggatctggtatttggtcaattacacttgcgatggcgattacaggttggatagggatgtcgcgtattgttcgtggacaaatcttaaagttaaaaaaccaagaatatgtattagcatctcgtacattaggtgcaacaaatacacaattaattgtgaaacatttaattccaaacgtaatgggacctattatcgtaatgacgatgtttacaattccatcagcggtgtttggtgaagcgttcttaagtttcatcggtttaggaattcagccaccatttgcgtcactaggttctcttgtaaatgatggttataaatctattcaaacgtatccgcatatgatgttcatccctgcggttgtcatcagtatattaattttagcgtttaacttaatggcagacggattacgcgacgcgttagatccaaaaatgcgtaagtaaaagaggggagaggcaaagatgaaaacattgttagaggtaaaagatttacaagtctcctttgatacacatgcaggtgaagtacaagctgtacgcggcgttacttttgatttgaaaaaaggagaaacattggcgattgtaggagaatctggttcagggaaatcagttacttctaaagcgttaatgggattaattccgaatcctcctggacgcattaaaaatggtgaaatcgtatttgaaggtcgtgacttaacaaaattaacagaaaaagaaatgcagcaagtacgcggtaaagatattgcgatgattttccaagatccaatgacatcattaaacccaacgatgacaattggaaatcaaattatggaaggtctaattaaacaccaagggatgagtaaagcagatgcacgtaaagttgctttagagttaattgaccttgtaggtattccaaatccagaagctcgtttaaaacaatatcctcaccaattctcaggtggtatgagacagcgtgtagttattgcgatggcgttagcttgtaacccgaaattattaattgccgatgagccgacaacagcgctagacgttacgattcaggcgcaaattttagaacttatgaaagacattcagcaaaaaacagaagcagcaatcattttcattacgcatgacttaggtgtagtagcaaacgttgcggaccgagtggcagttatgtacgctggtaaagttgttgaaattggaactgtagatgaaattttctacaatccgaaacatccatatacttggggtttaatcgcatctatgccaagtttagatggttcagaagaagagttatatgcaatccctggaacacctccggatttattgaagccgccaaagggagatgcttttgcaccacgtaacccacaggcactgaaaattgattttgaaatggacccacctttatttaaagtaagtgatacgcactatgcggcaacttggttacttcacgagcaagctccagaagtaaaaccgccggcagtcgttgaaaaacgcattcttcaaatgaaagcaggtgaacaacatgactaaacaacgtgagaaattaattgaagtaaaaaatgtaaagcagcacttcgacgtgagtggtggtgttgtcaaagcggttaatgatatttcatttgatatttaccgcggagaaacatttggtcttgtaggagaatcaggttgtggtaaatcgacaactggaagaacgattattcgtttatatgatgcaactgctggtgaagtgttattcgatggtgaaaatgtacatggtaaaaaatcacgcgcagagctgaagaaattcaaccgtaaaatgcaaatgattttccaagatccatatgcatcattaaaccctcgtatgacagtaggggatattattgcagaaggtatcgatattcacggactagcgaaaagtaaaaaagagcgcatggaccgtgttcatgaactattaaacacagttggtttaaataaagagcacgcaaaccgtttcccacacgaattctcaggtggacaacgtcagcgtatcggtatcgctcgagcgcttgctgtagacccagaatttatcattgccgatgagccgatctcagcacttgacgtatcgattcaggcgcaagttgtaaacttactgaaaaagctacaaaaagaaaaaggtttaacatacttattcatcgcccatgatttatcaatggtaaaatacattagtgaccgtattggtgtaatgtaccgtggccaaatcgttgagttaacaacaagtgatgaattatatgcgaatccaattcatccatatacgaaatcactattatcagcgattccacttccagatccagattatgagcgcaatcgtaaacgtatcgtatatgatccatcacagcataattatggtagtgaagcaccaacaatgcgtgaaattcgcccaggacatttcgtactatgttcggaagcggagtacaagaaatataaagagatttatcaataagaaaaagagccattcttctgttatggaaggatggctcttttctactatataaaagaattgtatacatttgtcggtcagtcgatatatttaaagaatcgccgatataaatctcatgtatcattagtgatatccatatgcaaaattactgaacttgaacagaaacattctcctcttgttcttcaggtttaacaagtgcataacgctcccatgctctacttttccagcggaagaacataataatggcacgtgtccattcgtcgatggcgattgctagccaaataccaacgagccccatatctaaatgaaaggcgaaaaagtaacctagtggtaaactcattaacaccatagagaatgcaccgattaaaacaggatattttgcatcaccagctgcacgaagcgaattaatgatgacgatgttcatcgtacgtcccgtttcaagtagtacacttagtaaaagaacacttgcgcctaacccgataatgtgcggattatctgtaaacagtcccattaattgtgtacggaatgtaataacgagagcgaccatacataaagttacaccaattgcccattttacacttttccacaagcgttcgtatgcttcatctttttcgccaccaccaacgaggcggccaataataatggctgttcccataccaattgcaattgcaaataaataagtgaacatggaaatgttagtagcgtattgtctagcagctaatgattccgttcctaagtacgttgcgtaataaaggaagacgatttgacaagcttgatacatcacttgttcaaatgcagatggaatgccaatttttaaaattttcccaatgtattctttggataaagtgaagtaatattgtaatttcacacgatattccataacgcggtatagtaaccagaagaaaacaataagtgcgatcaatcgactgatagcggaagaaattgcagccccttgtacaccgagctcagggaaaccaaatttcccgaaaatgagtacgtagtttccaacgatatgaatcatattcattccgagtgaaataaacatcgcttgctttgtaaaaccgtgtacacggataattgcggctaatgagttaataatagcttgtaggaagatggctcctccgacgatagataagtagttttgcgcatacgttagtacatcgccttgtaagttcattgcgagcatcatatgtttcgaaaataaaagaaaaccagcgcttataacgagcccaactattaaatttaatgtgacggctaatgctgatattttagatgcttccataaagcgtttggaaccgaggtattgagatacaacgatagcagcgccgttcccgatgacttctaataccaaaatcgcaatatgaagatattgattcgctgcaccaaccccagatacagcatcgtctgataatgcacttaacatgaaagtatcagcgatccccattaacataaaaagaaaaacttctagaaaaataggccatgttaataagaataaacttaatttctcagtaggcccgttttttgcctgaattgctgccatgtccgtcccctctttaccgatatctatttttagcaaaatgtatcgtaacatactttcttaacctttgcactcattttagcctacatatttttattatgaagagagtgctattttatgataaaaacaaaaggataattatacataaaatattatgagatataaaattcgtttttctctgataatttagaaaagtgtaaaaaaatattatttttaacactttagtatgaataatcagcaatatgaaacgtttacaaaggtatattttttaacggaaaattttaatgaaatagaaatataaatatacaaaaaatatatttgtgtgtataatatgaattattagaacatatatatatttctttttgtttgaaaatgaaagggttaacatttttttggagggtggaagtatgaaaaaaaagataccagtttttgtagcatcaacagtagcgatgagcatgatgttaggggcatgtagctatcaaaaagatgaatcgcaagcaaacgctaaaggggatagcggaaaaagcggtgcgaagcaagttattaacttaattgaaacacaagaaattccaacgatggatccagcgttatcagctgatgcagtttcttcaagagtaatgactaatacgatggaaggcttatacagtttaggaaaagatgataagctagttcctggtgtagcgaaggaattcaaaaaatcagaagatggtaaaaaatatacatttaaattacgtgaagacgcaaaatggtcaaatggtgagcctgtgacggcaaaagatttcgtatatgcatggcaaagagcgattaacccagatacagctgcgaaatcagcgtacattatgtatgatataaaaaatgcagagaaaattaataaaaaagagatgagtccggatcaattaggggtaaaggcgattgatgattatatattagaagtggaattagataattcaattccataccttgtagatttaatggtatatccaatcttctatcctgtgaatgaaaagtttgtgaaagagcaaggtacgaagtttggtttggaagcgaatacaactctttataacgggccatttacattaagtgattggcaacatgaacgtagctttaaaatgacaaagagcgcgtcatattgggacaataaagaagtgaagattgaagaagtaaactttaatattgtaaaagatacatctacgccaattaacttatatgaaacaaatgcaattgatcgagcgtcgttattagcggagtttattgataaatataaaggaaaaccagatttccaaacagtagaagatacatctgtattcttccttcgtttaaatcaaaaagatccagctttagcaaataaaaatattcgtaaagcaatttcacttgcttttgaccgtaagccattcgtggatacattattaaataacggttctaagccagcgacaggattaattcctgataacttcattaaaggaccagataaaaaagatttccgtgctgtaaacggggatattgtaaaaccaaacgtgaaagaagcgaagaaatattgggaagctggtaaaaaagaacttggtaaaaatgaaatcgaattagaattattaaatgaagatgtagagttatcaaagaaaactggtgaatatttaaaaggtgaattagaaaagaatttaccaggtttaacagtaaaaattaaacaacaaccattcgcacaaaaactaaaattagaagatgcgggcgattatgtcatgtcattctctggatggagtgcggacttcccagatccaattacatatcttgatatgtttgtaacagatgggtcacaaaataagatgaagtactctaatccaaaatacgatgaaatcattatgaaggcgaaaaaagatggaagcgatgtaaatgctcgttggaagaacttattagaagcagaaaaaatgttacttgatgatgctgcgatcgttccagtatatcaacgtggtagagcatatttacaaagagattcaattaaaaatatgtataaccataaatatggcggcgatttaagctttaaatgggcgtcagtagagaaataagaaaaaaaagcaggtgatcacctgctttttttaatacgttcgtttcttataaatgccttttccgccaacttggttccagccagattgtacatccaaacttttgttaacaaacttcattttttcttttccaccaaagagcttttcgccgatgctatttgtaatgacaccaatcaatgctgttattccgatgatgagggcagcaaccgtaataaaatcaataaaaaaagcaatcatttgaaaactccccctttgcctgtctgtatgtttattgtatgagataaaaaatgaaaaagaaagaaatgtcagaaaaatatttaatttactttagaaatcatgtagacaggagggaggatatttgttaaaataagaacaaatgttcctttttattctcatttgtatagtcttacatttcttaattgatttatcaagaaaaagtaagaaaacgttctctttttcatagggaagattatagataaataactatatattatatgaaaaatctatgggaagtgagtagtaaaagggttgaaagttattgttaaagtacagctgaaatgagcgtaatcatgttacatagcagtgaaatacacgggagagttttctcaactagcaggaaatttactgtatatttcttgcaaaatctattgtataatgattatagaagttacttattaaaagtaattgttgtttattataagttgttgcttacatgaaatgtgatttttgtacttttcaataagacaagttatcacgaaaaattgctgaagttagaaattaaaactgtatttagtacagaatttgtactctttaaggagagtgagctttgtatggtaacattatatagttctccaagctgtacgtcttgtagaaaggcgaaattatggctagaggaaaatcatattccctatacagaacgtaatattttctcagatccattaacgattgaggaaattaaagagattttacgtatgacagaaagcggaacggatgagattatttctactcgttcgaaagttttccaagaattgaatgtaaacttagagtctttaccacttcaagatttatataagatgattcgtgactatccagggattttacgtcgtccaattatgattgacgagaaacgccttcaagttggttacaacgaagacgaaattcgtcgtttcttaccacgtacagtaagaacgttccaattacgtgaagcacaacgtcttgtaaattaattataataatatgaaaaccttctacctattatatagtagaaggttttttttaatgtttcacattgcgtaatcgaacttgttgtacaataaagccgatgcataaaatagtgaaaatgaacaaataaggaatgcttgcagtgaaacttggattgttatgaaaaaaggttgcaagtctgtcttcatgtgtaaccatttttcctgcagtataggcaagaattgctgcaccgcaataaatgaggaatggaaatcgctccataagtattaaaataagtttgctgccccaaataataatcgggatagaaatgagtaagccgattatgacgagtaaaaatctcccgtgagctgcacctgcaatggcaataacattatcaaaccccataacgagatccgcgaaaacaattgtccgcacagcttgaaataaagttgtttttccttgaatagaagaaagatcgttgctattatcggttaataaattgactgcaattaatgtaagtaaaaccccgccaatcaattgtagaaatggaatgtcgagtaaatagacagctagtatagtaaggacaattcttagtacaatcgctaaaagagtaccgatcaaaatagccttatttcgtttcgattcaggtaaatttcggctagctagtgcgatgacgattgcattgtcaccacctaatacaacatcgataccgacaatcattagtacggatgttaaaaactctaagtccattcgtctgcctccatttatgatgttttaataagcgaactatatgtatgtgatgaagaaagttgttgttaaataatctcttctaatagaagtttcactttattacagtgtacgggggaatgtggaaatgtatgtccaaattttttgtaagtaagaaatcgctataataatatatttacgtagttgatcgagtaaagataggcatataactatttttgtaaaataaatcgattttatttccattctggagaatcttatcataaaatgagagtacaagaatctattgatttgtcatatgagtggggaatcccttcataacaattctaagcaggaagggagagttgtattttggatattgaaagaattaatgatcatacgatgaaattttttattacgtacattgatatagaggatagaggatttaatcgtgaagagatttggtatgatcgcgaacgaagtgaagagctcttttgggagatgatggacgaagctcgtgatcatgacgatttctttattgatgggccgttatggattcaagtgcaagcagtcgataaagggattgaagtacttgtcacgaaagcagagctttcaaaggacgggcaaaagctggaactaccgataggggtagacaaaattatagatattcctctagatgaaggcatcgaatcattattccagcaagaattagtcgaagaggtagaagaacaaacaggaacaaactttaatgaagatggtacgtttggctttttaattaagtttaatgattttgaagatgtcatttcattaagtcatcgtcttatctttgaagatataaaagatgagctgtattcatttgagaaccgctattatgtatatgtggaattcgatgaagtgctacatgatgaagaagaaatcgatcgtattttaagtattattttagaatatggagaagaatcaactttaacaattcatcgtgtaagtgagtatggaaaacaaattgtgaaagagcatgcgcttgaaacgattcgcaataattttcctgctaaaacgtaggccgatttctgtagtatgaaatcggctttttatatgaagaataggaaagctttcttagttaggaggtaagagatgaaaaatacgttaaagctgattttctttatactgctattgttcgcattatttgtttcgttacgtatgtttattgatgtagcattttattcagatgtgattgggataaaagatgtttcggttttaggtattattagtattttatttacagtatctgcgtttttaattggttgcgttattttcttagagaaccgtcatccgtcaaaaacacttacatggctcattgtgttaggtatttttccggtatttggattcttcgcttatttattattcggacagaactttcggaggaagagaatgttccaaaagaaggcgttgctcgatgaacaagcgtttttacaatataaggggcatgaagattacgaagaacggattttacgcaatcataagcatcaagagctgttatttcgtttagcggatcgcttaggcgctttaaatatttcatttcaaactgaaacgagaacattaacaaatggagatgaaacgtttcaggccattttagatggattaaaacgagcgaaacatcacattcatatggaatattacattgtgcgtgatgataagcttggaacggaaattaaagatattttaatacaaaaatcaaaagagggcgtagtcgttcgttttttgtatgatgcggttggaagttttaaattatcaaaatcgtatattgaagaattaaacgatgcaggagtcgaaatgattccgttcttccctgtacgctttccgattttaaacgataaaattaattatcgaaatcatcgaaaaatcgttattattgatggaaaagaaggctttgtaggtggattaaatattggtgatgaatatttagggaaggataagtacttcggcttttggcgagacacacatttatatttgcgtggtgaagctgtacaaagtttgcagcttattttccttcaagattggttttatatgactggtgaggctgtgctagcccctgaatatttacaagcgaaagcagttgagggggagcattggggaggcgtgcagcttgttgcaggtgggcctgataataaatgggaaacgattaagcatttatattttgccatgattgcttctgctcggaaatccatttggattgcaacgccgtattttattccggatgatgatattttatccgcattaaaggttgctgcacttgctggtattgatgttcgtttattaatgccgagtaaaccggataagcgtactgtcttttacgcatcgagatcttacttcccagagcttttagatgcaggtgtaaagatatatgaatatgaaaaaggttttcttcatagtaaagttgtcatcgtcgattctgatttagcttcaattgggacagctaatatggatatgagaagttttcatttgaattttgaagtaaatgcctttttatatgatacagatagcattcgaaaacttgttcaagactttaaagatgatttagaagaatcaagtgaaattcatgttgatcattttcataaaagacgtcttcatagacgaattgttgaatcaacataccgcttattatcacctttattataaaaagagatgtccgaaattgggatatctcttttttaaaaggaatttgtaacaaattgtagaatataaggagctgaaagggtgtgattacgatatttatcgctaaaagagaaaacggagagaaaattcatttactctataattgtaatgaaaagcttttgcgccgtatgcgtcaacaagaacgattcttttgtgtagcttgtggaaaggaagtgcaaatgaaattagggaaacaaaaaagttggcattttgctcataaaaaagtggattcatgtcttgccttttatgaagcggaatcaacgtatcatatgcacggtaaagaattgttatatagatggttcaagcgtcaaaactttcaggtggatatagagtactaccttccagaaattaagcaacgaccagatgtttttgtagagagggcgggcagaaaaattgcaattgaataccaatgtgcaaacctcgctatagagcagctgtacaaaagaacatattcgtattggcaagctggtatacaggtcatttggatcgttggtggaaatcaattgaaaaagcaatctgcatattggatgaaattttcctcacttatggctttctccttacaatcttatcctcagccacttcttattttcttctgtccgaaacaaaaatcatttatgaaatgtgcatttgtcactcccttttctacaaatgtctttttctcacatactatatatttaccaactgatacgactacttttgaaatgcttttttctcccgttcctttcgggaaagaaagattgggtgaagagtggaagaagagaaagaactacttccgcaaaaatgccctgccgatttggaattataattataagtcattattacgcctcttatatcaatttaaatgtaccccagcaagctttccttctgaaattggtgttccactcccttctgcatttgctttacaaacaaacccatttatatggcaagcttttctatatatgaagtgtatagggaagcttgcagtgggagagtgtatttctcttcaatacgtgtgtagttatgtaaaaaggtatacgaaaaggcggatacttccgtacttttcaaagcatatatggaaagtggcagttactgaatatatgacatttttatgctatataggtgttttgcgtaaagtgggaacttatacgtaccggaaaataagggatgtcatgatgttaaaaacagaggaggagattataaaacatgatgagatttgcttaatacatgcgctatctttatttgaggcaaattttaacatgagaggaggaaaaggggatataataaagaatgattgtgaaggaattacataagaaaaaaacgaattgtacttaagtagagatatttaaaggagggcttaaagaatgtctgaacaaaacaaagcgaaagcattaccagatcgcaacgagattgaagaagcaagtacgtggcgattagaagatattttccaaacggatgcagaatgggaaaaagaatttcaagctattaaagagctattgccgaagttaactgaatttaaagggaaacttggtgactctgcggacaatttacttgaggcattgcaatatgaagatgaaatttcaatgcgattaggtaagttatatacatatgctcatatgcgttacgatcaagatacaacaaactctgtatatcaagcattaaatgatcgcgcaacaaatttatattcacaagtatctagtagcacagcgtatattgttcctgaaattttatcgatttcagaagatacactgcaaacattcttgaaggaaaatagagatttaagtgtatatgaacatgcattagaagaaattacacgtcaacgcccgcacgtattatcagaagctgaggaagctttattagcggaagcatctgaagtaatgagttcatcaagcaatacattcggtatgttgaataacgcggatttaaaattcccatctattaaaggggaagacggagaagaaatagaaattacacatggccgttacattcagtttttagaaagtgatgatcctcgtgttcgcaaagatgcatttaaagctgtatatgaaacgtacggaaaatttaaaaacacattcgcaagtacgttaagtggagcagtaaaacgtaataatttcaatgcgcgtgttcgtaaatatgattctgctcgccaagctgcattgagcaataataatattccggaagcagtatacgatcaactcgttgaaacagtaaatgacaacttacatttattacaccgttacatcgatattcgtaagcgtgcactaggacttgatgagcttcatatgtatgatttatatacaccacttgtaccagaagtgaaaatgaatgtgaaatacgaagaagcgcaagaccttttattaaaatctttaaacgtacttggtgatgaatatgttgatattttgaaagaggcatatgaaaatcgctgggtagatgtgtatgagaataaaggaaaacgaagcggggcatattcatctggtgcatatggaacaaatccgtatattttaatgaactggcatgataatgtaaataatttatttacacttgctcatgagtttggtcattcggtgcatagttactatacaagaaaaacacaaccgcacgtatatggtgattattccatcttcgtagcagaagtggcatctacttgtaatgaagcgcttctaaatgattatttattaaaaacgacagaagataagaaagagcgtctatatttattaaatcattatttagaagggttccgtggtactgtattccgtcaaacgatgtttgcagagtttgaacatattattcataagaaagtacaagaaggacatgctgttacgccagacatgctaacggaaatttactacgatttaaataagaaatatttcggtgacgctttagtaatcgatgaagagattggtttagaatggtctcgtattccacacttctactacaactattacgtatatcaatacgcaacaggatttagtgcagcgacagctctatctaaacagattttagaagaaggacaaccagcagtagaacgttatattaacgagttcttaaaagcaggaagctctgattatccaattgaagtgctgaaaaaagcaggagtagatatggcatctcctgaaccagtaaaagaggcactacaagtatttgaagagaaattaaatgaattagaagcattattatttgaagaaaagtaatgaaaaaagacgagggattgtatcctcgtcttttttgttgaatagatttaatgtcgatatttgttgaaaaaaagatgaatttctttattttttctaactgaaaggatagctttacggctgatttttgaacttaaaaccctttgaatcgttttttataattgaaataagagagtgtgataacgatgattccgaataaaagaggtaaggcaataattttaggaaaagcttgtagtagagagaggatgtacaagaaaaaagaaacgatgacagctagaaagagaagagcaatataagattttttcataaataaaccccctaaatgaccttttttatagcttattcaaaaatgaaaacgtttagaatgtgacaaaagtgtgaaattcgacaaaaggggttgtcatctgacgtcgaatcttgtaatataataagcgtgaacgaattcacatacaaacatatacccctttgtttgaacgtgaaaatttctcccatcccctttaatatttttataagccgtaaagaaaaagacctggtgtttacaccaggtctttttcttttgctatccatttccaataacgttcgcattttacttcaatcatttgtacttttcgtttcagttgtaatttttttagttcgcgctcaatttcttgctgcggacagtcataaataaatgctacttcttttgaagatataaattgtgttgcttctagtagcacttctaaaggtggtaatggttctggctcaatttcacattttacaagttctttcaataattgtacgtatacatcgtaggaataatttccagcgattttaataccttcttcatctgagttcgcatgaaaaaagacgagggaaggtatttctgtaatatgcatttcattcgtgaatttcaagtcacattggaaagctttttttgcactagcagaatgtagatcttttttaaattcttctacatcaatattgctatctctcgcacatgcaagtaatagttcgcaatcagggtttgatacattttcaaggaaaatgtattcttggagttttcgcaaaaacttcgaacctgcttttcggccttgcaactccgctgccttaattgccatcgaaactaaatatggtgttgacgatgcttcttgcatatgtacctttccatcacatgaaaaaccttgtaaactggttgtcttttcccacacaaatcgaatattagcaggtttattccatttgtgtgaggaagcgttcgttccatccactttccctgttacgatatgacgaatagagaagtatttcccgtattcaagccatagtttaataataaaaggctcaatttcccagcaatctttacaaagtggatcaataaataaatatgcttctacagacttatgctcgcatgcggaaggagatggcatatttatatgctttgcttcctgcttatccattacacttcacctgtttcgtttggagtattaaccatatgctgagcggttaatgctaaacgttcaaaaacaaactctcttatatgaccatgcactccagtatcatccattgcttgctccatacatgatagccaagcctctgctcgttttggggtaatctcaaacgggagatggcgtgctcttaacataggatgaccatgttcttcagtgtacaaattaggaccacctaaatattgggttaaaaattgcttctgcttcctagcggtttctgttaaatcttccgggaagatgggagataagtcagggtgtttactgacataggaataaaatgtatctactaatattgcaatgcattgttcaccgccaattgcttcaaatggtgtcatcggttgcttgctcatcctttataaactcctttttccatgaaatgtatatctattgtagcaatggaatgttcgagagggcaaataaacagccttctcaaagattctttgcttattctacgggtgtaaccttttttagtgagatgtatccactagtgaaacatattcactagtggaattttcactttagcgtgctttgttttgtttggcaaggaaaaagcgttttactttgttatttgtatggcgaacgggtatgttatgttgcgttaataaatcaataaatgcagcttttcctgtttcttcatcttgcacttcaaattcaatttcataatcatcgtgattgtaatagaaactatgatcaaagacaagcgttccgcctttaaataatgtttctgctctttctgttgttaaactacccatatatgttaaagcagaaacaggaatttgtaatttgtgtaattgatctactactgctccttgaatgattgtgtttgtttccatcatcatttttgcttcgtcttctgttacgacttgatgcgtttctaataaaccaatttctgcaggttgtttcaacgttaacgtataagtttttcctttatgacgaatacgaagtgcagagccagcttcttttaacgagaagtcaggtgtttcaaagtagtgattcacttgttttgtaaatgcttcaatagaaaacgatttacataatgtatcgaattcttcttttgtaacgatatttttgaattcaatttcaatttcttgtgtcattgtataatctccttttgaaaaataattctttacacattatcgctttttcataaatttggttcaatgttttatttgtttgcgtccatgttatgatacaataatactgttaagtaagacaggaagttgagatggaggagttagagcatgcaaaataaaatccaagttaagagcgtagaaaagagagagaatgctcttattttttgtgcggaaaatagtgaaatagaggtaaaggagttaagtgcgcgtaatcacgtacttgtagactcagacaatttatcatttttatatatcttagaaaatgaatcatctttcatttatgtaagtattccgcacacatgctgggaagcaatgcatgaagcgatgaatagcgatgtggttatgttcgttcgcgtgaatgacattgaaatggaattagaaggattaaaagaagaagtagaatatttagttgaaaatattgaaggtaatgcaaattacggagaagaactagtaactgctgtagaaaaagtatttctataagcaaatggattgattttggtggtggttgaaatgaatcgaaattgggaagaatttttagcaccttaccaccaagcggtggcagagctgaaagtgaaactaaaaggaatgcgtactcaatttgcaatgttaacagagcattctccaattgagtttgtaacaggaagggtaaagtcggttgcaagtattattgataaagcggagaagagaaatgtaccgctagaccgattgagagaagatatgcaggatattgctgggcttagaatgatgtgtcaatttgttgatgagattaagcctgttgtagaatatcttcgaaaacgaaatgactttgaaatcgtggaagaacgtgattatgttacgcaaaagaaagatagtggttatcgttcttatcatgttgtcattagttatcctgttcaaacgattcagggtgaacaaaaagtattggtagaaatccaaatacgcacgctagcaatgaacttttgggcaacaattgagcattctttaaattataaatatagtggacgttttcctgaagatattaaaataaggttgcaacgtgcagctgaagcggcgtttttattagatgaagaaatgtcttctattcgtcttgaaattcaagaagcgcaaaaggctttttcaagaaagcaagaaacgaaagattctgaatcataaactaaagggtgttgggcgatgaaatttacaattatgtcaaagggagatcaatcatcagatacactggcaagcacgatgaaagagtacttgctagattttggatttataatggatgaaaaggaacccgatattgtaatttctgttgggggagatggaacgcttttatatgcgtttcatcgttattataatcgattggatgaaacagcatttgttggtgtacatacaggacatctaggtttctatgcagattggttaccgacagaagtagagaaattagtaattgcaattgcgaaaacaccattccaagtggtggaatatccgcttttagaagttattattcgctatgtgaatggaagtaaagagtcacagtatttagcgatgaatgaggcgactgtaaaaagtgcagaaggtacattagtaacagaagtagaaatacgcggagaatattttgaaacattccgcggagacggcctatgtatctctactccttcaggaagtaccgcgtataataaagcgcttggcggagcgattattcacccatctattgaagcgatacaaattgcagaaatggcgtccattaacaatcgtgtatttcgtactgtaggatcgccgctcgtattgccgaagcatcatacatgtgtgttaaagccagctgcaggaatgaacttacaaattacagtggatcatttaacgatggttcatcaagatgtgaaatcaatccagtatcgggtcgcaaacgagaaagtacgatttgttcgtttccgtccattcccgttctggaaacgagttcgtgactcgtttgttgcggataaatagaaagggttatatatttgaacagatttacattgaaatgggatataggtccggctgaagagggaactttagttagggaatttttgaaaacgaaatgtatttctaaagccgctttaacggatataaagtttcacggcggggcaattgaagtaaatggtcaacatgcgagtgttcgtcatcagttgcgtgctggtgaagaattacgtgtcttttttccagttgaggaaagaagtgaagggatgatggcagaagatatccctttaagcattgtatatgaagatgacgcggttcttatcattaataaagaggcgaacatgtcaacgattccgtctagagaacatccgacaaggagtgttgccaatgcgcttttatctcattatgataagcagcaccttgcaagtacagtgcacatcgtaacacgtttagatcgtgatacttcggggcttatgcttattgcaaaaaatcgtttcgtgcatcatcttttatcgaagcagcatcaacaaaaagctgtgaaacgaacgtatgaagcaattgttcacggaaagattgtagaacgagaaggaatgattgatgcaccaattggtcgaaaatctgatagcattattgagcgaacggtttgtgaggatggacaaagggcagttactcattttaaggtaattgatagtacatatcataagacacatgtagcgcttgagcttgagacaggaagaacgcatcaaattcgtgtgcatatggctcatataggacatccgttacttggtgatagcttatatggagggagaagggatgaaatgaaacggcaagcacttcatagtaaatctttgacgttttatcatcctattttagagaaagagatgtctttcactataaagcttccaagcgatatgcaagaagtgttgcggcatacttaaaaaggggacaaaattcttatattataaagaattttgttcccttttttcttagcggaataatattaaaatttggttttcacccgtacgctttataacgaaaaatccactttcggcttttgtagcaatgccattgtcatttggacgacaatatccatgtgcttcgcaagtgccgtcatcacgtactaacatttgtccaattaatccgacaggaagccactcggcgcgatcttttcttgctacatatttgcaagttggatcccattctgtatttaaaagaggttgtatttcttcggcttccgtccatacatattggcgttttccaaagttatctgttttataacgtttttgccaacttaaagccccgctatttcctataagggcaggggttgcactagatattcctaaaatgaacgaatcgcgtgaagtagctatccgaattttttcttcgttactaaatgtaacgaaataaccgacatcaataggtttataaccttcggtttcaaacatttgtgcaaaatccgttccgcttgcattgtaagacgcgccctcaatgtacatttctccattatgagcaagccatttagccccgatattatggtcggtgtcgcttacaccatttgcaataaaccaagaataagcttcttctgcaatgccgaagcgccccataatatggctacctgcaaaatgagctgttgatgtatgatgaccttccgcatgagaagaggatccgttagcgatagttgcgtttccttctgcgtgtgctgcttcgcctaaagcaattgtctgtttaccctccgcatgagaataagccccgcctgctgtcgtttcacttccctcactatgcgaactatgtccagttgcttttgagtttgatccttctgcatgagagaaagaaccttttgcgtgtgttaataagccttccgcatgtgctgccatgccctccgcatgagagtgaagcccctctgcatatgcatatcggccgccccttttaacttttgtattttcaggtgtaggtgtctcaattatgaggggtttttcagtttgtatatcattcgatgaagccaatgcctcttttattttttttactttgtttataatagcagctggaatttctggttccacttttttatttattgctacagaaatattttcttccgtcttttcttctgcttgattagaatgtattacctgttcatcttgatttgagagctgtttatttttttgttgcatctttatttttctgcgatcgattatgcggctcatcacagcattttctaaagagacatatgttggttttactttgcttttttttgatgactcttgttcttccagttcttctatcgctgcagcccgaatactacaccagttgttaattccgtacatgggcagatataaagggggaaattttcttttttgtttagaagattttttcttcattctgtcacctcctgcgacattatatgtagtgtaattaaaaaaagatgcactttattgcatctttttttaattactttacctagttttatatgagatctgcctaaataatgctaagtaaggtagttatgaaattggacggaatttctcagcgacaaaaggtaaagaagaagggacagagatagtctccatttcaggataacgtaatccggttaatttgccaccaaatacagcaccagtatcaatattgactgtctgattgacgaatcgaggttctgttactggtgtatgtccatatacaatccaagcttgccccttgtattcttgcgcccaatcgcgacggacaggtgagccatcggcatgcttttctcctgtaatatcgccatataatacaaaggtttgtacttttttatctcgtcttcctatgtaatcttgccgaatcccagcgtgacatacgattactcttttttcatctagtatgtggtagagcggtgattgttcataaagagtgataaacttttcttttataatgttttgcttattaggaggaagtgcctcatattcagcaacagttgtttcaagtccgtgagcgactgttacattacgcccaaggaaaaatcgatatagtttattacagtgatttccaggagcgtaataagcttcttttttatgtatgacaagttcccatacaatttcaatcatacgtaatgaatgaggaccacggtctgtaatatcgccaacgaatgcaagtttacgttggtcagggtgaaccggtagaccgctactccagttatatcctagcttctctgttaaattttgaaactcttggaagcatccatgaatatctcctataatgtcatatttcatatttaaacctccatcgtatttttcattagtatatctaaaaaaggatagagataaaaatatagcgtttttgtgttgttcatttaaacataaagattttcgttcttgagcgaacatttaaaatgaatccaatcgcaatcatgtatgtaagcagtgaacttcctccgtagctcataagaggtaatgttatccctgtaatgggaagtaatccgattgtcatcccgatattttggaatacttggaaagtaaacattccgattgtaccagcgcaaatgtaactaccgaaaggatcattactttctaaagcaatatgaatcattcgaaaaatgagtaagaaaaaaagagaaataatgacacttgcgcctagaaatccaaattgttcagcgacattagtgaaaataaaatctgtatgtggttctggaaaatatacttgtccattttcccacccttttccttgcatttctccggatccagtcgctaagaatgcttgtcttaattgatagccttgtgcatcatatttgtaaggtgctaaccatccgtagaagcgatttaattgatattcttttaaaatgtgtgctttaaagaaatctgtgtgagtaaaaaaaatatatattaatgtagttccagcaacgaaagtagctgaaactaatccgaaaataaaacgccatcgtatgccagaaactagtatcattgctgcaagcatcgctgaaatgaccattgtatttcctaaatctggttcctttgcgatgagtagtagtggtggcaaacttgttgcaaatatttttccaagtagtaaaaaatcgtcatgtattgtttgggaaaaatatttctcattatggtttgctataattcgtccaatgacgataattaaaaataatttcataatttcagaaggctgaaaatttccgatgcctgggagcctgtaccaagcggtagcgcctttaattgtaacggcacctggtacttgaagttctagtccaataagtagtaccattgcaaagctgtacaaataccaagcaattttttgataacgatcgaagtcgataatcataataacaccaatggctataaatccaatgaaataccattggatttgctttagtacaaaattgacgttttgtaaaaatggcggtaaagaggcttgcgcacttgcaatagcacaacaactaacaatcccaatggcaaataaaataaatagtaatacgtagtctatttgatattgagaatttggatctttcaatgtaggtattcctttctactgctctttatagtaatggattttatcccgcattaatgggcagtaagacccctacctcaaaattcagcgaaagcgaagaagttaggtgggggatcaactgcccgtaaaagcccgattggtgagagctgattaaagtttcactttatagtatgagaaagaatgtatgaactatacgaatgattcacatatagtccatacacttttaattttgcagagtagtttaattgtttaactctttaataattatatccaaacaatgggaaagacgtacatgtgcgtcaggaaaaatatctagttgatgaagatagtattttaaggaacttttacaccattggtaagcactaagtagagctgctctatagtctgtagtattttgtaaaaagccatattcttttgctgttataacgaggtgtgtgaaatcttcacaaccttgaaggagcttattgtgtatttgttgtccagcatggtagcgaaattgacttaaaggctcagaaatgtatattgcatttcctttagaaagtaaagaaatccatgaggccatatcaacactacaagaatattgtcgctctttaagagtgccaaaaggttcagtgagcaattcctttcggaacaaggtagttgtaggctcaccgataatgttgtgtccaccttttaacatccaattacctaaaaatatcccgtttaatggggtgtcttcactatataacctttgtgttggatgggaatcacctattagatttccatgatcatcaatgcgtactcgataagaagtaacaagagcaagatttttattgggatcttgctcaaaataggtcatcattttttgtattttatgcttataaaacacgtcatcgtccattaaaaaatttatatactcaccatttgatttttctatgagcataaggtcattgtgaaattgtcctagagtaggaatatttcgaatgtatgttatatttttataatttggtaagtattgttcgcgtattaaagttgctgtttcatcatttgtactatcatctccgatgatgatttcaatattagaataagtttgtgccaatgcactttctagagcaattttgaaataatgaggccgattataagtgggaataaggatggaaacgagaggtggatttttttcattcatcatacataacttcctttcagaagcttttttttgtaagaacaatatcttggtaacttgtatattcatgtctgccgcaccataaaccgtaatgcggcttattgattatttctaggccgtacttattcaatagattgcaaatatctgtctcaggataagcaactgcgaaattcggaatatctttatttacaacgtagcaattttcgattcgatgataaaaacctaatgtactttgtcctgcatttaaataataggacgattcaggatttataagaaagaatgtaatgaaacatctcccgtctttttttaatacacgtacaatttcagatacgtaatgttctaattcttttgggagaagatgcgtaaatacagaagttaaaaagataaaatcgaatgtcccgtcttcataggggaaacgatattgagaggcatcttcttttccttctggattatagaattgattgtatatgtcaacatgttcaaagtgaaaattattacgcatagttgaaatgttattttggcaccaagtaattccatctttaaacaaatcaaatccataatacgctccatcatcatttaagtaattcaataatggtacagccattcgaccgacgccgcagcctacatctaatactttttcatttggttttaaagcgccaatttgaataaaatgctttaggaactcttttccaacttttttgaagtcgccacctacatattggacgagttcaggaggggggagtaaagtcatttctttgttaagttcactcatgagtatacccctttcttgtatgagaagatgcagtaaatctattaataaaattttcaatttgtattgagagaacacaggaaaacaattgttatatgtaaggagattccgaaaaagaatacttaattggattagaagtgagagaaggatgagtgaaaatgaaatctcctatagattaaatcttttttattcttttctccaataaacgccaaatacatcaattttagtaataggggcttttaaatttcgttggtttctaaagtctgtcacagcctcagcgcatggcggtagcccgtagtcatcgataattatatagccacctttagaaactttatcatataagttcacgagaccatccattgtggattcgtacatatcaccatcaagccgtgcaattgctattttttcaattggtgctgttggtaaagtatctttaaaccagccttttaaaaatttcacttgatcatttagtaaatcatattttttgaaattctcttgtacttgttctaaagagacgcgtaaataatcgaatgtgtgcaaataatcaccgtaatcttttggatattgttctagattcggtgctggcaaaccttcaaatgaatcagcgacccacacattacgattcgtaatgttgtttgcttgtaaaaaaccattcataaaaatgcacgatcctccgcgccatacacctgtttcaataaaatctccctctatattttcacgaacaacggtttccattgcctcttgtaattggttcatacgttctcgaccgatcatgctatgtgctgctcttggccaatccattccatcatggcgttcactttttgaaacatttggttttacaatttttaagttatggttttcagcatattgcttaatgaataaagggagggggactgtaactggctcgaattctagttcttttgaaatatgtagagatgcgggtaagtatgcctcatattctaaccatatttcaaataaaatggtcttctttagcaattcgagataaagctgaacagcagatttactttccatatttgtgcctcctgcaaaatgtcatacaacaatatgattatgtagatagcgaatgtttcatgattgaatttgaaattgaaaaagcagtaaaactgatatcagttttactgctaagtaaaaatttaagcgattttttcaataataatagatgcatttgtaccaacagctaatgatagcccaagccctgtaacgattacttcaattaatgatggagttgtcgtaatttgcgtaattgcttgaacaacgataggtgctccaactgagattaaagtggccccagtacctggaacagataccccatttacttggattgtaagtcctcctaatagacttactgctgcagtgtatacgataacggtaattttatagaatccagtttgactaattacgaaagtatcaggatctaattgagaaattgctgtaccaaactgagatccaacagtattaaatggtactggagcattaagtccaatatccaaagaaatcccagcggagttaaatgcatacaatcctgctggaagccctagtccagatggtccagtcggtccagtcggtccagtagccccagtagccccagtcggccccgtaggtccagtagccccagtgtcaccagtcggccctgtaggtccagtagccccagtgtcaccagtcggccccgtaggtccagtagtcccagtgccaccagtaggccccgtaggtccagtagtcccagtgccaccagtcggtcctgtaggtcctgtaggtcccgtaggtccagttggcccagtcggtccagttggcccggtaggtacagtcggccccgtaggtccagtcggtccagtcggcccggtcggcccagtcggaagggtaaacggtggtatcggtggtaatgtaggtcctacaagattagggtcaaatgcactagctgataaagattcatcgggatttaatccatttgaataattattatttgacataaattcacctccataaagcgttcattatatagtagatgcaaaaccgaaagaaaatgacacggacatttgaattattgaaaagaaatcttaaactacttgaacaatttaaaaaaatggaaagtttagtatatgtataacatatgattgatttggaagagggtgattatgttgaacaagcaaggaattacaattagtttatgtatgattgttcgagatgaggaggagacaatagcccgttgtttagaaacagttgaaaaaattgtggatgaaattatagtagttgatacaggttccgtcgatcgaacgaaagaaatcgtagagaaatacacttctaacatatatgatttccagtggattgatgattttgcagcagcaagaaatttttctttttcaaaagcgacgcaagagtatatattgtggctagatgcagatgatgtcttattagaagatgctcaagaagcattgaaacttttaaaaagagaattagatcctaaaattgatgctgtttcgatgccttatcatcttgcaatggattctaacgggaaacctttatattgtacaaaaagaaatcgacttgtaaagcgtgaaaaacaatttcaatggtttggaaaggttcatgagtatttagctatttctggtgaggtttttagtagtaatgttgctattacacataaaaaagaaaaaaaagtaacaaatcgtaatttgaaaatttttcaaaatactgtagcggcaggtgaagaattaagtccgagagatttattttattacgcaaatgaatctacggataaccaaaaatatgatgatgcagttcttctatatgaaacatttcttaatcaagacgaaggatggtatgaagagaaaatttatgcatgtggtaagttaggagattgctatgcaaagctaggaatgtgggagaaggcaatcgaatcttgtgtgaagtcgtttcggtatgacgtccctagaggagagaattgtacaagaataggatatatatatatggaacaagaaaaatataatgaagcgatattttggtttaaacttgccacggaagtaccaatggcaacggaaagtcctttccatagtccagctagctacacatggctaccctatttacaaatgtgtatttgttatagcaggttaggggagcaggataaagcgtattattacaatgaattagcagcttcttatgttccgaataatgctgcaattgaatataaccgtaaatattttcggggagtttttgataaaccatataaagtgtaataggtttcgttttttagaaatgatttatcgctattctaactctaatagattggttatatattagagtatcagtaacgtaaccaatataaataaaagattttatactgctatttgcgggctaataatcattgggggatgaacaaaatctgcactttatagaattcatatgagatttatatttctaattcaatttgcataaggagtgtgtgaaatgaatcgcgaaaaaagttctttatatgaagaaaaatccgagcattattataatgcagcgaatccgaatttattaaagcatataaaaaaggaatggaaagaagttcttgatattggttgctcgagcggtgcattgggagcagctattaaagaaaacggtacacgtgtatcaggaatagaggcatttccagaggcggcagaaaaagcgaaggaaagactagatcatgttattttaggggatatagaaaaaatagatcttccttatgaggaggggcaatttgattgcgtcctatttggggatgtattagagcatttatttgatccgtgggctgtgattgaaaaggttaagccatatataaagcaaaatggtgtgattttagcaagtataccaaacgttgctcatatttcagtattagctcccttacttgctggaaattggacgtatacagaatatggtttattagataaaacacatattcgtttctttacattcaatgaaatgctaagaatgtttttaaaagcaggatattcaattagtaaagtagatcgtgtatatgttgatcataaaatgtatgagccgcttattgaggagttatatggaatttgtaaaaaatatcgtcttggaagtggcttcatggctgagacagttgtatttcagtatattattgaagctgaaaaatcacaattatgagtgctgcagacaaaacaatattatttgttacatgcataaatgatcggaaattgtatgcaaactgcgtgcgacatatattgcaattgttagtaccgccagggtatattgtccaatttatgccgattcgaaatgcgaaaagtatgacgagtggatacaatcaagccatttcgcatccagcgaagtataaagtgtatttacatcaagatgtttttattataaatagggcttttttatacggattacttcaattatttgaggaacatgaaaaccttgggatgattgggatggttggagcgcaatatgttcctccgactggcgtatggaacgaagggcgtggaattgtaggaaaagtcattggttatatgaatgatttgttttatatggcaagtttagaacaaccgtatcatgaatcaaaaacatttattcctgtagaatgtattgatggtttattaatggcgacacaatatgatgttccgtggcgagaagacttatttgacggatttgatttttatgatgtatctcaatcatttgaatttaaaaaagcaggatatacagtcggtgtacctgtacagcgcgatgcttggtgtatccattatcattttgatgtgaatatgacgaactatgaaaagtatcggaaaatatttgtggaacactatatgtcagatgtaaataaggaagaataaaaggggggacaaaaatgaaagatcatacaatattagtcgttgtttgtgtaaataatgaggagcttttcaaacaatgtgagagccaaataagaaacatttttgttccctctggttatgtcgtgcaaatttttccgatacgagatgcgcaaagtatggcaagtgcatacaaccgagccctttcatatccagcgaaatacaaagtgtatatacatcaagatacatatcttattaatcgagacgtgttttctacacttatatctctttttaaagaaaatgaaaagcttggtttaataggagtcgctggggctcagtttttaccgaataacgggatatggtgggaaggaaaaaatttagtagggaaagtgattgagtatagaagacggaattatcaattattaaatttagatcaggttttttatggtaatcaaccatttttgtcagttcaggcaattgatggtttattcatggcaacgcagtatgatattccgtggcgagaagatttgtttcaagggtttcacttttatgatgtgtcacagtctttagagtttcaaagggctggttatttaattggtatcccaaatcaagcaaatttatggtgtattcattacaacggggatgagtttgatgcggatacatatgagaagtaccggaaagtgtttgtagaacattacaaagatatattatctccatcataaaggagagatgaaaagtgaaaggaattattttagcaggtggtactggatcgagattatatccaataacgaaagtaacgaataaacatttacttcctgttggtcggtatccgatgatttatcatgcggtatataagctaaaacaatgcgatattacagatattatgattattacgggtaaagagcatatgggggatgttgttagctttttagggagtggtcatgaatttggagtgtcctttacgtatcgtgtgcaagataaagcgggcgggatcgcacaggcgttagggctttgtgaagatttcgtcgggaatgatcgtatggtagttatattaggggataatattttttcagatgatattcttccgtatgttgaagagtttgcaaatcaaaaagaaggtgcgaaagtgctattgcaatctgtagaagatcccgaaagatttggcgtagcacatattcaaaaccgaaaaatagttgaaattgaagaaaagccgaaagagccgaaaagttcttatgcggttacgggaatttatttgtatgattcgaaagtcttttcttatattaaagaattaaaaccttctgcacggggagaacttgaaattacagatataaataattggtatttaaaacgaggggtacttacttataatgaaatgagcggctggtggactgatgcgggaactcatgcttcgcttcaaaaggcgaatacgttagcgcgtgatattaattttgggaaacagtttaacggagaataggtgagaatatgaaagttgtagaaacaaattttaccgatgcaaaattgttagaaccgaggttgtttggagacgagcgtggctttttttcagagagttataataagcaggtgctagaaacattagggataacgtattcatttgtacaggataacgtatcttattcggctaaggcaggaacgattcggggactacactttcaaaaaaaaccgaaagcacaaacgaaactcattcaagttatgcaaggggcaatttatgatgttatcgttgatttacgaaaaaaatcaccaacatttaaacaatggaaaggatatattttaagtgcagataaccatcggcaattactagtgccaaaagggtttgcgcatggattttgcacgcttgttccgcatactatcgttatgtataaagtagatgaatattatagcgcagagcatgactcaggattactttgggaagataaagatttagcaattccttggccagtaaccgatcctatattgtccgataaggatcagatattaccattattagaggaatatgaagatagtttttaagtaggagcgttgtttatgaatatattagtaacaggtggggctggatttattggaagtaatttcgttcattacatgctacaaagttatgaaacatataaaattattaattacgatgccttaacatatagcgggaatttaaataacgtaaaatctcttctggatcacccgaattactcttttgtaaagggagaaattcaaaatggagagctattagaacacgttataaaagagcgggatgtacaagtgattgtaaattttgcagctgaatcacatgtggaccgtagtattgaaaatccgattcctttttatgatacaaatgtaattggaacggtcactttattagaactagttaaaaaatattcgcatataaaacttgtgcaagtgtcaacggatgaagtgtatggctctttaggaaaaacagggaagtttacagagaaaacaccgttagctccaaatagtccatattcttcaagtaaggcgagtgcggacatgatagctctatcttactataaaacatatcaattaccagttatagtaacgcgttgttccaataactacgggccgtatcaatatcctgaaaaattaattccgttaatggttacgaatgcactggaaggaaaaaaattaccgttatatggcgatggattaaatgtaagagattggttacatgtaacggatcattgcagtgcgattgacgttgttctgcataaggggcgtgtaggagaagtatataatataggtggaaataatgaaaaaacaaatgtagaagttgtggaacaaattattaatcttttaggaaaaacaaaaaaagacattgaatatgttacagatcgtttagggcacgatcgtcgttatgcgattgatgcagagaaaatgaagaatgaatttgattgggaaccgaaatatacgtttgaacaaggattacaagagacggtgaaatggtatgaaaagaataaggaatggtggaaaccactaaaagaccagtaaggggcatgttaaatgaaagagagggttatcataacaggagcaaacggtcaattaggaaagcaactatttgaagagttagactctgaagaatatgatatatatccatttgataaaaagttattagatgtgacaaatatatcccgaatacaacaagtggtacaagaaataaaaccacatataattattcattgtgctgcttatacgaaagtagatcatgcggagaaagaacaggaccttgcatatagaataaatgcaatcggagctcgaaatgtagcggttgcttcacaattagtaggagcgaagctagtttatattagtactgattatgtatttcaaggcgccagaccagatggatacgacgaatttcatagtccagcgccgataaatatatatggggcctctaagtatgcgggggagcagtttgtcaaagagttacataataaatattttatcgttcgcacatcgtggctatatggtaaatatggaaataattttgtcaaaacgatgatgcgattaggaaaagaaagaaatgaaatatctgttgtagcggatcaagttggctctcctacgtatgtggcggatttaaatatggttattaataagctcattcatacttctttatacggtacataccacgtatcaaacagaggctcatgctcttggtttgaatttgcacaaaagatattttcgtacgccaatatgaaagtgaatgtattacctgtttcaacggaagaattcggggctgcggctgcgaggcccaaatattctatttttcaacataacatgctacgattaaatggtttttcacaaatgccgtcttgggaagaaggattagagcggttttttatagaaaccaaaagtcattaacaaatttctgttaatgacttttttgtttgcctttaagcggttttatggtactataattatagtatcaggtactaataacaagtataagtatttctgggaggatatatcatggaactattacaagggaaaacatttgttgttatgggcgttgcgaaccaaagaagtattgcatggggaatagctcgctctttgcataatgcaggtgcaaaattaatattcacatatgcaggagaacgtttagaaagaaacgttcgtgaattagcggacacattagaaggacaagaatcacttgtattaccttgtgatgtaacgaatgatgaggaacttacagcttgctttgaaacaattaaacaagaagtaggtactattcacggtgtagcacattgtattgcttttgcaaatcgcgatgacttaaaaggtgaatttgtagatacttctcgcgatggatttttacttgcacaaaatattagcgcattctctttaacagctgtagcaagagaagcgaagaaagtaatgacagaaggcggaaatattttaacattaacataccttggcggcgagcgcgttgtgaaaaattataacgttatgggtgttgcgaaagcttcattagaagcgagcgtgaaatatttagcgaacgatttaggtcaacacggtattcgtgttaacgctatttctgcaggaccaattcgtacgttatctgcaaaaggtgtaggcgatttcaactcaatcttaagagaaattgaggagcgcgcaccacttcgtcgtacaacaacgcaagaagaagttggcgatacagcagtattcctattcagtgatttagcacgcggtgtaacaggagaaaacattcatgttgattcagggtatcatatcctaggataaatataatattaatttttaaaggacaatctctaaatgctgagattgtcctttttatttgttcttagaaagaacgatttttaacgaaagttcttaccacgtgatgaatataactataatagtacacgatttatttagctacgtatggaagtgggagggacgagtgtgaagaataaaaataaaagttcaacagttggaaaaccgttgttatatatcacgcaagtaagtttagaacttgctgcaccgaaaataaaaaggattatcctgacaaactttgaaaatgaagatcaaaaagagaaaagtaatagacaagaaaatattgtaagaagtgctgtggaagaggtaatagaacaagaacaacaagaagagcagcaagtggaagaaaaaatagaagaagaaaaagaagaacacatagaacaagaagagcaagaaccagaaccagtaagaactgtcccgtataataaatcatttaaggatatgaataatgatgaaaaaattcattttttactaaaccgccctcattacattccgaaagtaagatgcagaataaaaacagctacagtctcatatgttggatcgatcatatcgtatcgtcatggcattgtatctattatgccgcaaaatagtatgagagatattaggttgtctatagatgatatccaatcgattagtatggccggtttttaaatatgtaaaggtggtagaaagcttctaccaccccaatagttttttagtttactttacgatagaaacgtcgcgtaagcattgaatcgcacagaaacagcttaaatcaacagtaatgcaagtagttgtagatattaatcttgcatttggtacagctaaaaacgtacaaattggatcgtcaccaggtggtaccggagtaccgtcacctaatactacagttaatacacgtagcacagcacagctatcatcatctacactttccacacggaaaattggagatcggcagctagtaaggcttgaagatggtgcaaatgcttcaaaaggttctccagtttttgtgtataaaataaaagggcgtgtatttgctactgatgcagtattgtgtgcacctaaaaatgggatttcacaaccagatccacatgttgttgtagaacaatcttgtaattcattgatgaattttacaacgtcaactacacaatgagaagagccatggtgtttattttcgttacaactcattaatgtcactccttatcttcttgtttgtatttacattaataagatattggagtcgaggagatttggtcacaatctcaagacctttttttttaaataggcgaaagaggataagggtaggtggaattatgctgtttacaagctggcttttattttttatttttgcgttagctgcttttaggctcactcgtttaattgtttatgataaaattacagcctttttgcgaagaccatttattgatgaattagagattacggagccggatggaagtgtatcaacgtttacaaaagtgaaaggtaatggattaagaaagtggattggcgaattattaagctgttattggtgtacaggtgtatgggttagtgcttttttattagtcttatataattggatccctatcgttgcggaaccgttacttgcattattagctattgcaggagcggcagcaatcattgaaacaattacaggatattttatgggagaataatatattttcataatacgagaaaaagcggagtttaaaagaatgagggaacggaaataaagagttgttcatatagtaaatagacagaattgacagtagaggagatgtttgctgtgagcaataatctaaggcagaattcatatgacctgcagcagtggtatcatatacagcaacaacaccaagcacaacaacaggcatatcaagaacaattacaacaacaaggatttgtgaagaaaaagggatgcaattgtgggaaaaagaagaacacaataaaacaatatgaagaatgaaacactcatgctactgtgagtgttttttattatatataaaaagcggtatttctgtataagaaataccgctttttactagctaatttgtgcaactgttaatgctgcagcacgaatgtctacagttccaattaactgaactggcacaatttgaattaagtcaccaggatttaagttaataagaataacaccgctggatacgtctacttcaccagtaccaataacgttagaacgaactgctgtacctgatccaggaataatgttagctggtgtatttaatgataagaagaaacgaccagcttctggtgcagtaggtacgttatcaagactaattgttaatgtataactaatttgataaataccagctcgtagaattcgaatgccatctccgacacttactgtatcatttattacaggaacagtaatatttgggtttggacttacgctaggtaataatagtggtgtaaatagtgaagcaaactgaggtgcagacgcgttgaaagcaaaaccaaaggcaggtagtgtactagctggcttcgcctcacaatcgattttagtaaattcgcaatcagaagagaacatgtttttcactcctttatctgtttctactttcagttaatgaaaaggacaggttctatgttctagacaagttcccaattttaagaaatttacataagaatactctttaagcatggattgggtggcagaatactctgccacccaatccatgcttaactcattatttagttttaaatagaaacatcacgtaagcattgaatagcgcagaagcaacttaaatcaacagtaatgcaagtggaggttgatattagtcttgcatttggtacagctaaaaacgtacagattgggtcgtcaccaggtggtacagcggtaccatcacctaaaactacagttaatacacgcaatacagcacagtcatcatcatctatactttctacgcggaaaataggagatcggcagctagtaaggcttgaagatggtgcaaatgcttcaaaaggttctccagtttttgtgtataaaataaaaggacgtgtattcgctactgatgcattgttatgtgcacctaaaaatggaacttcgcaaccagatccacatgttgtcgttgcacattcttgtagttcatgtataaaacgaacaacattcgatacacagttgaaatcacactcatgttgatgatcttcattacaattgcagctcattatgttcactccttctcgtgagttctgacatacactattacaatatgagtgggatatggctgatattacgttaattctcacgataaaaacaaggaatttatataggagggatgtacataacgtgatataaaaaaagacatccttatttagtggatgtcttttcaggtaaatcttttcgcacagtatataaaaaacgagatatatctaatttctttcctctgaaaaattgcggagaagaaatgtaaagttcttctttcgcacgtgtaatggcaacataaagtaatcggcgttcttcttctaacgcttcagaagtttccgtaacacgatcatttgcatcttttaaagaagaagtatgaggcaggattccatcactcgctccaagtaaaaagacacatggaaattcaaggccttttgcgttatgaattgacataagtgaaacggcatctttttgcggcattgtttttaatgcttccatttctttttgaccttgaatcgcctcgtcgataaattgtaaataagctggaatatcggtgaaacgagttgcagactccattaattcttccaacatttcttcttgtatgtctttatgcattgtaaaggaagaacgatcgttattttgtaagtactctaaatattttcctttaccatgaatgatttcttttaatgcttttttcggttctaattctttaataaacttaataaaatcgatgcgctcatttacctttttcacttgaaaaggttttaagcttggatttaatagtaagaaatgaagaagagaagggaagcgcccctcaccatatttccattgttcacgttcaataaatgaaatacaatcatcacgtccgatatacatcgtcggcaatatgtttgaaagtgattctagtcgaaacggctcaatcacgagtcttaaatgatctaatacaggcttaattaaagaatgttcataaaatgattggctcgctccgtgtttaataaacgggattttatgaatggtaagctgatcaagtaacgaacgacttacagaatgtgtgcgatacagtaaacaaaaatctttaaagttacgttcaccactctctactttttcttgaataagctgcaaaatttgatttgcttcatcaagagtcgtagcaggtcttgcataaaaaggttgtacaccttcctcacgaacagagtatagctctttatcaaaacgttcttgatttaattttataacttcatttccaagcccgacgataaagggattggatcgataattcgtatttagtgcaatgattgttgtgttatcaaattcttttggaaaagataaaataatttggtgacttgctcctcgccagccgtatatcgcctggtcgtcatcacctgcgataaataaattatttcttggcgtggctaacaattttacgatttcatattgtgcatacgatgtatcttgaaactcatctacttcaatatagtgaaaacgttgttgtaattgagttagtaaaggagcattattttctaacatataatatgtttccaataagatgtcatcgaaatcaatataattgtatctttgttttacctcttcaaaacgttcgtatacttctttaaattcttgttcgactggtgttttcgcttttacatctttcggacgatttaatttgtttttctcaagtgaaatcatcgcgagcatcgtttcagcatcataatcgtcttttaaacgcaattcttttaagattttctttatcataatttgtttatgtttttcatttgctaaaatttgctgattataaccttgactacgaagtaattttaagaaaacagagtggaatgtaccagcaactacgtagctacttgctgcatgattcatacctggtaacttcgcaacacgacttcgtatttcttcagctgctttttgtgtaaatgtaagtaataaaatatttcgtggatgaacttgttttacatttactaaataaccaacgcgagttgttaaaacagatgttttcccgcttccggcaccagctagtgtaagaacaggaccttctgttgtgcgcacggcttctaattgtttttcgtttaaaaaaacattttgttgttcaagagcgcggaaataagccgcatctacatcttcttccataattaaatgggtagatgttttcggaatatgatatgtcgcacgcggaatatcagcgtgtgttaacgatttttgtgaaaatttttcttgtgtcatatgttcaccttcaaaactatagcatcaacatttaactttagcggaagaaaaagaaaatagcaatgtaaaaaaacaggagggatcacctcctgctttcaaattacaattcttttatcattacgacgtgcgggatattcgcttccataaatacatcagaacttgttacatatccaagttttttatagaaatcttcggcatgtgtttgagcgtgaagtttcaatttcggtagcgaattttcttttgcatacgcttcaagagaatccataacaatttttccaatcccttttttgcgatgggaatttagcacgcaaatgcgttccatttttcctataccatcaaggatgcgaaaacgtccagcaccaactggaacatcattgtcatatataacaacgtgtgttgaaatttcttcaaactcatcgtactcttcttcagcagagacacgttgttcatttacaaacacttgtttacgtacagagaatgcatctcttagttgttcgtccgtttgtacaatctgtgcgtgcaaattagttgttcccctttccaagacggaatgtttcgtgtacagtccatgttccattttctaattgatatagaagatggaaacgatcaattggttgttcgtaatagaaatctttcatacgtaatcggcccaacacatcagcatgctctgcatctgataagccttgtccgattgttaaatgaggtacgaaagcatattcgcgttcttgcgtgaataacccgctatgcatttcttcatttaagaaagtaagttcaggtgttttttctactttaaagtaaaggacgttattaacaggtgcgaatgaaccaactttcccaacatgaagggtgaaagggttcgttttacttgcgattgtatgtaactcgtttacaatcgactctaattgttcatcttgcgcctcaaagggtgttttcaatgtaatatgtggcggaactaatgcgtagtgcgggtcataacgtttacgcaatccgttcgctttatcttgaatcattttagatggaaaaattacaatgcctaatttcatgttccaattcctccctttgtaagtctagttagattttgagataaataaatctctttatctattatatcaaattattctgaatactgctctctattatttcattgatagaatatgagagaaggctttcggtaaatcagtctgccaatatttccaagtatgattgccttcaaattcctcataatgcgtgatgaagtttctatctgtaagaagtgtatttaactcacggttcggccctacgaaatcagatacttgtccatcagtacgctttacagccgtttcttctgtaccgatgacgtgatacagttctaacgcctgtggatctttgaattcttttgctaagttcatcactgtctcatccacaaatggtgattgcataacgactttaccgaatgtatgcggatacataagtgcagtcataaaggaaactgttccgccaagagaatcaccaattaaaacacgaccttttcccatttggtacgttggataattttcatcaatatatggtgcaagttcatgagcaaggaaacgaatatatgcagcattttttacttcatttgggaaatatttttctttacgatcatgtacatttttatatggaataccgacaataattgtacggtcaatttcttcggtttcacgaaggcgctcaattacacggtgcgctttaccaagctgaaaataatctctaccatcttgtgcaattacaactgtatgtttgtgcagtggtgtgtaatttactggtaaataaacgagaagtgtaacatcttcttgaagtgatgcgctataaaatgaaatttcttcaattctccctattgtttgactcatgtagatccccctaaataaaaatttactgtaacgattgtaagagcgacgcttgtagtgaaaaggaaagaaatattcactaattggtgccttaatttctattttaccataatgatacgaagaatctaaaaaattagtatttaagttgcgaaagaaaacggatataatgaagtgggatttttgacaggtgagaggggagacaggatttgaaacaagaaaaatcaatcgcactaccattagcaatttctataattgccatttcctttgcagcagtttttgtaaagatgtcctcagcaccatcttcaatattaagtatgtaccgcttatggattatcgtacttattatgctgcctatcgtatggaaaaaaagagaggaatttaataggattcaaatgaaagattggggctttttaattggatctggtttctttttagcacttcattttcttttatggtttgaatctttaaagcatacaacagttgctagttcaacaattattttggcacttcaaccaatcgtatctttagttggaggtttttttctatttaaagaaagaacaacatattcagccattgcaacgatgggaatcgctattttaggagtaatgtgcattggttggggagatttaggtttaagtaagcaagcaatttatggtgacatattatcctttctaagtgtaatagcggttgtcggttatttatttatcgggcaaacgacagtgaagaaagtatcgcactggatttatagctttacagtctttgcgttcgcaggtctttttatggggatttataatgttatattacaagtaccctttacaggttatacgaagtgggattggactgtttttcttttacttgcggttgtgccgacagtgtcacatgtaattaataactggctattaaattatgtaaatgcaacgacaatttcaatgagtattttaggagaacctgttggagcatctatacttgcgttcttcttacttggagaaaaattaaatgcaatgcaaatgatcggtagcatgctcgtattgtttggtgtatctgttttcttactgcagcaacaaaagcgaacagcaaaaaatgtcgtaaatgagccagtgtatacacaggaattatagtgttaggggagaaaagagaagttgtgatacttctctttttgttttatagaaatacgggcgtagaagggggaagaaaatggaagagatattaaagaagtatatgaatagatttacaacactaagtgaagaagagcagcaaatgattctcagtgaattacaaattgaagaatataaaaaaggaacagtgctcctaagacaaggaaatgttccgttaaaatgttattttgtattaaaaggatgcgttaggcaacatagtatagatgaagcagggaaagaagttacatcaaatttttatacagaagagcaggcaatttcgaatttcaaccatcataaacaagataaatcttcatcatatacgttaacgtgtttagaagattgtactgtagttgttggtgatctacatagtgaaaaggacatgtataataagtattcacaattagaagaaatgacgcgtaaaatgatcgagtacaatttcggtgaagtacaagatgaacttgctgtatttatctcatcgacaccagaagagcgatataaaacattgttacgaaaacgcccgtatttaattcatcgtgttccacaatatcagctagcaagctatcttggcatgacaccagaatcattaagtagaattaagaaacggcttaattagagtgtttaccacctttcaatagtagccatatcgcaagtcctaattcacctgcaatcataggtaattggaatagtgattgtatgagtgaaatcattgtatcgtattgtgtaaacattgtattcatgacgtgaattagcatataaccggtagcagcaatgaacagcagtatactaataaactttggtatctgtttagagagaaaagctacatagcctaaaacgaaaagatgcaatccaaaaatgatcaatcctacagaccaaatgtattcgaatgcactgagaaacaacattgtatatgtttctggatttgcaattgtattttttgaaagcaataatgccaatattagattgaatatagcaatcccaagtatagctgtatacataagacgaagcaaagcggctagtaatgagaggctagtatgaattggttttagaaagaaataaagagcccacgcagcgacaatatcagtgataaaaatgataatccacccaaaaacttccgctttgaaaagtgaatttgaagtttggatattatggaatgttgtactcgcatctccttgtataacgaggtttccatgaacaaaaccgtaagagaaaaatgcaatgaatgccataacaagaagagatgtgctagcaaataaggcgtactttcgttcagtcataatatgtcctccttttctaatattgttttcattgtaatagggaagaggaggagattcattgacttaaatcaagacggggaaagtttagtagagtttccatcaaaaaaaatgtatggttatatccaattttttattaaccttgtaaaaagtaaaaactcaaatattgaaatcaagtaaaagagtggctacgaagccactcttttactttggatttgtcatataaggttgtacatgaatgacacataggtcacgaaatttgccttcagcagttgtgacaattacgactgctttacctgcactttttccagtaatcgtcacggtgtcaccttttggatatatggtgatgatatcagaattcatatttgaccaaataagctctttattcgttgcttgtattggtaaaatggaagctgataacacaatgttttgtcccgtttttatttttaatttatgtttttccatatgaacaccgatgactgaaataacagaaggagcaattgaaattttaggcgggttaggttgcatgtttaaacaagacgcagaagtatttgtgataggtgaaaattttcgtgtttgttgttgctggaaagctgctaacatgttggagtcccctttctgtataagtgctgatactcatactataaaggagtagtgttatgttaaatttaacgaaacataaagaatttgttaaatttgataaaaagattgtcgaactgtaaaaaatctctgctgttatgataacagcagagatttttttataaattatgacgatgttgtttttcgaaatcctcaaattgctctttaacttcttttgaaggttgtgttagtaaactaacaattacgatggctagtaaactaatagcgaaacctggaatcatttcatataagaaatcttttaagaatttgaattgagtccatataataacagtaacggcaccagaaatcataccggcaagtgcgccccacttcgtcatacgtttccaatataagcttaataaaatagcaggtccgaatgaagaaccaaatccagcccaagcgtatccaacaagagctaaaatcgtatcattttgtttaaacgctaatgcgcacccaactaatgcaataacaagtacagccatacgaccgacaaatacaagttctttatcagatgcagaacgtttgaagaatgtacgatataaatcttcagttacagcactagaagtaacgagtagctgtgatgaaattgtactcataatcgctgctagaatggctgctaataaaaatccagtaataagtggatggaataaaattttcccaagttcaaggaaaattgtctctggattagataatgtcaactcttgttgtgaatagtaagcaataccaataagaccagtaaacatagctccaacaacagagaaaatcatccagctcataccaattcttcgtgcacttttaagttcttttacagaagaaattgccataaagcgtacgataatatgaggttgtccgacataaccaaggccccatgcgaatagagaaatcattcctaaagtagaggcacctttaaaaatatctagacgtgttggatctacagatcgaattgtatcaaatgcaggtccaagtccgttcgaattcataattgttacgataggaacaagaataagagcgactaccataatgattccttgcacgaagtctgtccaacttactgctaagaacccaccaaataatgtgtaagctacaacaacgcctgcaacaatgaataatccaacgtggtagttcataccaaatgaattttcaaataatacagcgcctgaaactaatcctgaagctacatagaaagtaaagaaaatcataataacaagtccagatactaaacgtagcatatgagatttgtcgtggaaacggtgttccaaaaattctggaatagtaatagagttatttgcaatttctgagtaggtacgtaagcgaggagcaacataaagccagtttgcgtatgcgcctagtgttaggccgatcgcaatccaactactacttaatccaacgctaaacattgcacctggtaatcccattaaaagccaaccactcatatcggatgctccagcacttaatgccgttactgcggggcctagtgtacgcccgccaagcatataatctgttaagttggacgttcgtttataggcgaaatagccgattactaacatcccgagcatgtaaatagagattgaagttaaagttaacatctgcgtactcatgaagttccccttccttttgtcatgtcttttgatgcgttatgcatatttatcccgcataaacgggcagtaaaattcccaccttaaaattggctgggcaaggaagttaggtgggagagcaactgcccgtaaatgcccgattgatttaactaataatcagtgggatgaacaaacccctactgattaaagtttcactttataatctatcatgattattctgaaaaatccatatagaaatacgaattttcagaaatgtaagcgttttttgatgtcattttacttttttaatatataatattcatacaaaaaaccttatttttaatagagtatttattatatttacataaaaagaggttgttttgtcaatataatattgaaaggaaagaaaaataaaatttttgaaaaagtattgacttgtgaaaaaagtcaggtctataatgagtgcaacttaaaaaaatgcaagcgttgatgaagaagagtacacatgatgaacatgtcagagagctgatggttggtgcgaatcagtatggaattgatgtggaatgggcttcggagcttccaaaccgaaacgaaagaagtaggctttggcgacatgatctcatcgatacaagagacacgtattgtttttgatacggtaaagtgcgttacatttgtaacgaattaaggtggcaccacgggagtacccgtcctttctataggatgagtactccctttttgtgtataaaaaattaaataaatgaaatcgtttaagtaagaagagtacgtatattggagacgttacagagagccgggaataggtgggagcccggtacggtgccgtatacggaatgggcttacgagaggtatgctgaacaattattttcagtaggcaacccgggttccgccgttacaaggataaggtataaattttgtacctgaacaaagcgggatgcttttgcatccaacacgaggtggtaccgcggtatatttatcgtcctctacatattttcgatatgtagaggacttttttatttttcagagcgaggtgaaggacatgatgacgaaagaagaatttataaaacaaaaaagagagagaaagacatttttagtaatcactgaagaagaaggagatagcattacgccaatttctttatatagacgtatgaaagggaagaagaaattcttattagaaagttcacagcttcatcaagataaagggcgttattcttacttgggatgtaatccttatggagaagtgaaaagcgttggtacgggagtggaacgaacgatttacggccgcgcagaaaagttacaaggtaacgtactacaagtgttagaagaagtaattgcaccatcacaagtagacagtccatttccattttgcggaggagcagttggttatattgggtatgatgtcattcggcagtatgaaaacattggagcggatttacacgacccattaaatattccagaagtacaccttttactatatcgtgagtttatcgtttacgatcatttacgccaaaagttgtcgtttgtatatgtatgcaagcaagatgattcagcagattatgaagaagtatacgaaaggctgcgagtatacaaagaggaagtgctacaaggagaagaagctgaagtaaatgcaatacaatccacattatcatttacttcttctataacggaaaaagagttttgtgagatggtagaaattgcgaaagaatatataagagcaggagacatattccaagtcgtattatcacagcgtttacaaagtgaatgtattggggatccattcgggttataccgaaaacttcgaattgcaaatccatcaccatatatgttctatatcgattttcaagattatgttgtactcggttcttcgccggaaagtttactatcagtaagggaggataaagtgatgacgaatccaattgctggtacaaggccgagggggaaaacgaagagggaagatgaggaaatcgcaaaagaactgttaggcaatgagaaagagcgagcagagcatatgatgcttgtagatcttgggcgaaacgatattggtagagtgagcgaaatcggctcggttacgatagataaatatatgaaagtagaaaaatactctcacgttatgcacattgtatctgaagtttacggaacattgcgaaaacaaatgggcggatttgatgcgttagcgtattgcttaccagcagggacggtttctggagctccgaaaattagagcgatggaaattataaatgaactagagaatgaaaaaagaaatgtatacgctggtgcagttggatacgttagtttttcaggaaatcttgatatggcgctcgccattcgaacgatggtcgtaaaggatgaaaaagcatacgttcaggcaggagcaggagtcgtttacgattcagatccagtagctgaatatgaagaaacattaaataaagcgagagcgcttttggaggtaatgaaatgattgtacttattgataattacgattcgttcacatataacttgtatcaactgttaggcgaacatgaagaagaaattgtagttgtaagaaatgatgaaataacgatagaacagttagaagagatgaatccaagaggaattgtactttcaccaggaccaggaaaaccagaggatgctggcatttgtatcgacgtcatccgtcatttttataagaacgttcccatattagggatttgtcttggccaccaagcgatcatatctgcatttggaggagacattgttagagcagagcgtattaaacacggaaaaacatcgcgtgtgaaacataacggaacgtcaatcttttcatatgttacacagcccctaacggcgatgcgctatcattcccttgttgcagagcaaacgagcttgccaaagtgctttgacatattagcgacagcgatggacgacggagaaataatggcagtccgtcacaattattatccgctcttcggattacagtttcatccggaatcaatcgcaacagaagaaggcggaaagttaatccgtgcctttttaacagaagtaaaagaggaggaaagagtatgaacaactatcttcgtaaattagtggagggtcaacatttaacagaagaggaaatgtataaagcaggactacttttattaagtgaaaacatattagaaagtgaaattgcagctttcttagtcttactgaaagcgaaaggtgaaactgcagaagaaatatacggtctcgttcgagctcttcgcgaaaaggcattgccgttttcgaaccatatacaaggagcaatggacaattgcgggacgggtggtggtgatgctcaaacgtttaatattagcacaacatcagcattcgtactggcaggagcaggtgtaaaggttgcaaaacatggtaatcgtgctgtttctagtaaaacaggaagtgcagacttattagaagaactaggtgtaaatattagtagtacgccaaacgaaattgattatttactagagcatgtaggtattgcatttttatttgcaccagcgatgcatccagcactaaggcgcattatgaaaataagaaaagagttaaacgtgccgacgatctttaacttaattggccctttaacaaatccagtgaatttagaaacacaatttgtcggtatttataaacgagatatgttattaccagttgcacaagtattacaaaagttaggccggaaacaagcgcttgtcgtaaatggaagtggttttttagatgaagcgtcattacaaggggaaaatcacgtagtccttttaaaagataatgaaatagtagaaaagagtattaatccagaaaagtatggtttttcaagagtgaaaaatgaagaaattagaggggggaattcaaaagaaaatgcaaagattacgcttgaagtattgagcggagaaaagagtgtttatcgtgatacagttttattaaatgcaggtctagctcttttcgcaaatggaaaaacggaaacgattgaagaaggaattaaactcgcggcacatagcattgactctggaaaagcattagccaaattaaacttattaattgtagcaagcaacgaaaaattagaaagggtgaactaaagtggggacgattttagataaaattgtagaacagaagaaaaaggaagttgcggagttatatgaaatatatacaccagtaaaaacaaaaagaaagacacattcacttgtagaagcgttacagcagtttactgtcattgcagaagtaaagcgagcatcaccatcaaaaggagatatcaatttacacgttgacgtacgaaaacaagtgggaacatatgagaaatgtggtgcaggagcagtatctgttttaacagatggtcaattttttaaaggatcgtttcacgatttacaaacagcaagagaagaaagtaacattccgcttttatgtaaagatttcataatcgataagattcaaatcgatagagcgtatgaagcgggagcagatattattttactaatcgtagcagcgttaacgaaagagaagttaaaagagttgtatagctacgtgttagaaaaaggattggaagcgattgttgaagttcataatgaacaggaattagaaactgcgattgtattaaatccgcacgttattggtattaataaccgtaatttaaaaacgttcgaagtagatttaagccaaactgaaaagcttggaaaaagattgaatgaggagaaattactttggattagtgaaagcgggattcattcaaaagaggatattattcgtgttaaaaaagcaggagcaaaaggtgtattaattggagaggcacttatgacatcatcttctattagtaacttttttgaagactgtaaggtgaatatatgaaagtgaaaatttgcggcatcactgatatggaaacagcaaaacgtgcttgcgaatacggcgcagatgcactcggatttgtttttgcagaaagtaagcggaaaatcactccaaagagagcggaagaaatcattcaggagcttccagccaacgtgttaaaaatcggtgttttcgtaaatgaatcagtagaagtgatccagaaaattgcagatgagtgcgggttaacacatgtacaactacatggagatgaagataattatcaaattagaagattgaatattccgtctataaaatcactaggagtaacttcagaaagtgatatgaaaaatgctcaaacatatgaaacggattatatattgtttgatagcccgaaagaaaagtttcacggaggaaatgggaagacattttcatgggaactacttgtgcatatgccagaagagttgcgagagaaaacgatattagctggtggattaaacgctcttaatatagaagaagcgattcgaactattcagccatacatggtcgatgtaagtagcggagtagagacagaaggaaagaaagatctaaagaaaataaaacaatttattaaacaagcgaaggagtgttccaaatgaattacgcatatccagatgaaaaaggtcactacggtatatatggaggacgatacgttccagaaacgttaatgcaatctgtattagaactagaagaagcatataaagaagcgatgcaagatgaagcgtttcaaaaggaattaaatcattatttaaaaacgtacgttggaagagaaacaccgctttatttcgctgaaaatatgacgaagtattgcggtggtgcaaagatttatttaaaacgtgaagatttgaaccatacaggagctcataaaattaacaatacaatcggtcaggcactacttgcagtacgaatgggcaagaaaaaagttgtcgctgaaacaggggctggacaacacggagtggcaaccgctactgtatgtgccctactcggattagaatgtgtcatctttatgggagaagaagatgtgagacgtcaaaaattaaatgtgttccgaatggaattactcggagcgaaagtagaaagtgtagcggcaggtagcggcacattaaaagatgcggtaaatgaggcgcttcgttactgggttgcacacgtgcacgatacgcactacattatgggatctgttctcggaccacatccattcccgcaaattgtccgtgatttccaaagtgtaattggaaatgaaacgaaaaaacaatatgaggagttagaaggaaagttaccagaagcagtcgttgcttgtattggcggtggtagtaatgcgatgggtatgttttatccattcgtacacgatgaagaagttgctctttacggcgtagaagcagcagggaaaggcgttcatacagaacagcacgcagctactttaacgaaaggaagcgttggggttttacacggatcgatgatgtaccttctgcaaaatgaagaaggacaaattcaagaagctcattctatttcagcagggctcgattacccgggtgttgggccagaacatagcttactaaaagatattggccgtgtttcttatcattcgattacagatgatgaagcgttagaagcatttcaattattaacgaaaaaagaagggattattccggctttagaaagctcacatgctgtcgcatacgctttaaaattagcgccgcaaatgaagaaagacgaaggacttgttatttgtttatcaggccgcggggataaagatgtagagagtataaaacgttatatggaagaggtgtaaaaaatgggagtagaaaaaattaaagcagcgtttgaaaatggtaagaaagcatttattccgtacgtaatgggcggagatggtggctttgaaaaattaaaagaaagaattcgttttttagatgaagcaggagcgagcatcgttgaaatcggcattcctttttcggatccagtcgcagacggtccaacgattcaaagagcagggaaacgagcgctagatagcggtgtaacagtaaaaggtatttttcaagcattaatagaggtaaggaaagaagtgcaaattccgtttgtactcatgacatatttaaatccagtacttgcattcggaaaagaacgattcatcgaaaactgtatagaagcaggtgtagacggcatcatcgttccagacttaccgtatgaagaacaaaatattattgcgtcgttacttcgagaggcaaacattgcgctcattccactcgttaccgtaacgagtcctattgaaagaattgaaaaaattacgagtgaatcagaagggttcgtttatgctgttacagtagcgggcgtaacgggagtacgtcaaaactttaaagaggagattcatagttacttagaaaaagtaaaatcacacgtcaacttaccagtagtcgctggatttggcatctcaacaaaagaacatgtagaagaaatggttacaatatgcgacggagttgtcgttggaagtaagatcattgagcttttagaaaatgaaaagcaagaagaaatatgtgaattaatatatgcaacaaaacaaaaagaagaggcgtagtctcttctttttgttttgcgtaataaatgttaaaatatacagaaaatacatataatttagagggtgagaaggcatgctaagacgtaaactactatatctatttttaactgtaccgctatacgcttggctcattagcatgacgaaaatagagttaatggctctatttttagggtatgtattcatcttttccaacttaaatcgcattcaagaacagtctattttagaaatatgtctattttcgattagtatagaattatttagtatcgtttcgattgtattattaaacgaattatttctacggattcattcatttacattaatgaaattttggaatattatattgcaagcaatatgtacttacattgtgtttgttgtgttgaaagaaatagtcggaaagcagaccgtttttcaggataatagaaaatgggagtgaatgaaaaggagccgtttggttccttttttgaatctgttgtaaaaacaattgaaaattatagtatctgttatataatagttaaaaattgtattttaaacgaaatgagatgataacatggccatattgttggcacttatcccaattatgatgattttcatttgtttatttttatttaaacaaacgtcattaaggtcctcgttaatttcttatgctgtgtctgttggaatcgttttactctcgccaatgtttcaattagggataagtgaaactgtgcacgcaacgattaaaggatggttaatttgttttattgtcgggtacgttttatttttcggtatttttttatttcacctcatgaacaaaatggggtacatcgatcaagtagcacgttttctagaagcagttactcaggatcgcttattacaaatgctgcttatgtgttttggcatttgcccgcttattgaatcagtaagtggattcggtattggcttcatggttgcagcacctatttttctttcactaggatataaaccatttcaagctgtactactctcattcatcggcttactagctagttcatggggcgcaatggcaactggtacgattatcggttcgcagctaataaatatgcctcttacaacatttggcacaaatacagcgctattaagtattccgatgtttgcttacttcgttattctttctttacacgttgttggcggctggcaagcggttatagaaaagtggaaagaaggagtagggttctttctattattttctctcggaatctatctttctaatgcgtacgtaagtgttgaactagccgggatattaagttctatcgttacgattacctttggcttttttatcattaaattaaaaggaaaaagtgggcaaaatcttataacagaacatgcggctgcaacggagagagaagtatccattataaaaattattagcccttatatatttctaacagtttgtattttactttctcgcctcgttccagcattacatgatttgttcagatcatatgcggttcttgatttgaaatcatactcttacaaactagagttactatattcaccaggattttggctcggtatgacttgcttatttactattattttcttccgcatcccgtctaatattattaaacaatcactctcacaaacgattaaacaatggattccatttgctattacgacgacaatgtttatcgccatttcagaactaatgggtgcatctggcatgcattcattactcgcaaagacagctggtgaaacatttggaacctttttcgttttcgttgctccgtttattggcgctattggtggatttttaacaggtagtaacgcaggatcaaatgcaatgtttataaaactacaaatgcaaaccgcacaaaacgtagcactcccgtggcaatatgtcacaacacttcaaaacaccgcatcatcagtagcgacaattgcttgtccatcacggattacactaggtgcttacttatgtaatatcccttaccgtgaaaatgaactattaaagaagacgacgttaatgatctttggtgcgattttgcttgtagtggtagaagttattgtttggtatatgttgagaaattaaaaatcctcctaacataggaggattttttttatgagtggataatgatttaaatatgaatagcttctactaaatgaataggagatgaaatgtatgcccctaaaaaactacggtgtgttaaaaggtacagttatacaatcaaagattggaaaagggaaaacacctcattatcaagttcatttacagggcgagacaggagtaaattatcgtattgcaattaacgtaaaatcgcaaagctatccgtcagaagttttatattttgcgagtaacaatattaagtcagaggcgattcatattttaccgacattaccattcgattttacagaaataaaaaacaatgaaccgaaagtagctttagattatgtaagaggaaatctatttgactcaaatcaaatgattcctttgcctcccgaaaaagcaggagcagataatgatttaaatgaaaaaatagaacgttatataaaacgagcaatagaagaaaaagcaattatttacgcgtttggtgaaagatggggaccagaagaaaatacaccagattcctattttcatttcaaaccaggaaacggtatacatgatattcatatgaatcaagggaatgtagaaaaatggcaaggtgatgatggcatatggcaagatggaggaatactcattcactttgaaaaggaagaagaatggatcggtatctttcttgccttccaatcacagtcatggtgtaccgatgaagaggggcatgctcgtgtgcctgttgagcattgtgattataaggggaataattaataagaagagggcgttcaaaaagaacgccctcttcttattttataaaacgaaaaactaacgagtgtagaaagacaagagaacagcagtgccacactagaaaacgcaatgagatacatattatatttcataacctgtccaattagctgattactgtcgtattgaaacagtcctgctattatgttgaataaaaataacacgataaacatgacgacaacaccgtctattgatcctttaatgtctggtttacttaaagcgatatgcgcggaaatgcaaatggcgataaataaaaataaccaaaaggaaggattcaataaattgccgattgtaaataagcttttcaataatacaaacgtcgacaagagcatgttttggatcatttctacattaatagaagtagaagcaatcgttttttcgagagttgtattaaataaaaaatatgattctggtacgaaatagcgcattaaaaggattaacgcagtaataccagaaataataggcccaatgccgatgaagaaattcccaatccgttgatacacacttttttgattgtattgatgttgtacgtaacctaaagccccttgacttgtatctgtcgggaagaactgcgttgctacaatcttatgacggaacagcacgcacataatggcatgtccaagttcgtgaataggaacaccaatccaagccgttaataggaatccttttcgtccaaaagctctcgaccaatacatccgtgtgagagattctaaatagcctaatagaaatccaattacaatgataacgccaattaaagataataattggattacgcttgtaaggagtatttgaaaaattgagtttaccaattccattgccagtcatccaatctgttaaaaatattatttattctgtttcataatagcattttttttcaagattactagcacatatattttctttcggaagaaggatttcagaatctttttcttgtagtcatgttttatgtacaaattcatatattgaatttgtaacaccctatacggtatatccttaaggagggataagagaatgaaatgtccgtcatgtcatacagaaaatgcagcggaggcaaaattttgcgggaattgtggacattcgttaacggaagaagtagtggcaagtagtggccaagaagaagggccggaacaagcacgtgcggcacaagcaaaggaagctcggcaaaatgaaacggtagagcaagcgaagcggtttgcgagcggctattttcaattttttaaacatgcattacaagcaccgacagcgattatgcaaagcggcgctattgaagtacgaaatggaattgtaagtcttgttcttatttgttttttaggagcatgtattttttatagaatgatgagtgcagcatcagcagttacgagaacatttgcaccagatatatctactcccacgttttttgtagaatctataacggtctttttctttttattaattttaactttatttgtcggatttattatttttgtaagtggtaagatgatgaaatcatctttttcgtttcttgaagtattcggtatatggggaacgatagcgacgccggctattgtcatattagtcctttcttttctttttagtttcttattaatctttttcttaccgatattattatccgtagctgcaacttatatagggattagtataactgtagccgtattaaagctagacaatggcggattagatctcgtttacacacttattattgcaaatgttttaattggaattgcaacattcattgtactttggtcttacattagcacgataattcaagccttaacacagggaataactggcttctaatgaaaaggtggttgactggatgaatgtatgtacaaagtgcggagttcagtttgaagatggtgtgcagttttgtcaaaactgcgggacgaagaggggacgttctgtagtaaagaagaacatgagcggtggtgtaaaagttggcattacactgttagcgctatttgttatagcgattattggattgtatttgtacggattgtcgtattatacgcaggtggcacaagtagaccggatgattacgattttacaagagagggacggagagaaattagctgagatcgttacggcagatgatccatcggttatgataacgagagagagcgtaacgcctctattttcatatataaaagaaaatccatcttacgtgaatgaattaaaagaatatttgagacaaggtgaaaaacaacgggacggaatagaaagagctgatttttcattaacgaaagacggaaagtatttctttatatttgatcgatataaattgaaagcgaagacgtactatgcaactttgctttcaaatgaaaaagacgtatcgttaaaaatgaacggaaaagaaattgataagacagatgacaaaaagtttgagaagcaatatgggccatttcttccgggaaatcaagtgtttcaatcagaatataaaaatgactacgtaaaactatcacgtgaggaaaaggttgtacttatgaaacaaagccaaaataacgtaacgatagatttaacgttgcaaggtcaatatattacagttcaaacgaacgcgcctggtgcaacattgtacgtaaatcaaaaaccagttacagcgctcgcaggagaagaaattacatgggggcctgtagcgactgatggaagcgcgaaaatttatttagaacgaaatggagaaaatggacgggaaacgacaaaagtagagacggtaacggcactttcgtcttataatcttccattccaaacgaaaagtgcagaaaaaacagttgtttataatgttactccaacgcccgcaactgggtatgtatataatggtttcatctttcctgatagtgatattcgaaaattaacgagcacagatttaacatatttatcgaaagaacagttgaaaattgctagaaatgaaatatatgcaaggcatggacatatttttcaaacgaaagatatgcaagcgtattttgcaaaacagtcttggtatagagaaaatccttattttacaggaaagttaacagatatcgaaacttataatattgaactaattaaatcaagagaatagagcgcgggaaaaaggtacagtgtatattactgtaccttttctatcgttatttggctggacgaggttccctagagaaaaagatatgaaagagaaatgtgactttacttgcccctcctgatgtactggcttgcacatcagataaagaactagacgttaaagcagcttcagaatgaggagggacgattattttaagagcatcatctgattctgaggatgcagtaactgttattgtatcgtcagaaaaatttaaaattttaacagtaccgactggaaagatggccttgcgagcatgtgatgaagaagcgaagcgggtagctttccagatagtttgtgagaaagtgtcattgtcagataaccaagcacgagcactgtataaagttacactaaccgtaaactcctgttcaagcgggagggcgggtttcggttctatcggttcctctggaagctggacgagaaggccggcgcacatgtatgtttcacctactttcaactggttactgttataggatattaaacatgttgtttataagacacgacagttacctattcaggcataagtttgtgcacaaaatttgaagatgaaattctctttctttacaatggaagtaggtgttatttctataaaatatggaaaacgtaaagagtatgtaaaaaagaaggagtggtaaagtgaactatgtcattattggcggagatgcagctggtatgagtgcagcgatgcaaattgttagaaacgatgaagatgcaaatgttgtaactttagaaaaaggtgaaatttattcgtacgcgcagtgtgggttaccgtatgtcattagtggtgctatcgcttcaacggaaaagttaatcgcgcgtaatgtaaagacgtttcgtgataaatacggaattgatgcgaaagtacgacatgaagtaacgaaagtagatacggagaagaaaattgtgtacgcagagcatacgaagacgaaagatgtctttgaatttccatacgatcgtttattaattgcgactggcgtgcgtcctgttatgccagaatgggaaggacgggaattacaaggtgttcatcttttaaaaacaattccggatgctgagcgcatattaaaaacgctagaaacgaataaagttgaagatgtaaccattattggcggcggtgcaattggacttgagatggcagaaactttcgtcgaacttggtaagaaagtaagaatgattgagagaaatgatcatatcggtacaatttatgatgcagatatggcggaatatatacataaagaagcagataagcatcatattgaaattttaacgaatgaaaatgtaaaagcattcaaagggaatgaacgagtagaagcaattgaaacggataaaggtacgtataaagcagatcttgttttaatgtcggttggagtgaagccaaatactgattttcttgaagggacaaatatacgtaagaatcataaaggagcaatcgaagtaaatgcatacatgcaaacgaatgtgcaagacgtatatgcagccggtgattgcgcaacacattaccacgttataaaggaaattcatgatcatatcccgctcggaacgactgccaataaacaagggcgacttgctggactgaatatgctggataaacgaagagcatttaaaggtacgttaggtacaggcattattaaatttatggatttgacactcgcaagaacaggattaaatgaaaaagaagcgaaagggctacacatcccgtataaaacagtcaaagtagattctacaaatatggcgggctattatccaaatgcaaaaccactttacttaaaattactatatcgctccgatacgaaacaattattgggcgggcaagtaattggagaagaaggggtagataaacggattgatgtgatcgcaatggcgcttttcaataaaatgagtattcacgatttagaagatgtcgacttaagttatgcaccaccatataacagcgtgtgggatccaattcagcaagcggcaaggagagcagaatagcactttttaaagtgctatttttttgttaaaggggaattatcatttttgtcgaatgaagaggatcgggaaatagttacatatgaggaaggggagtttttttatgattgtagcacttcaaaaggttcaagaatcagaaaaagaaatattacgtaatttgtacgctttatatcttcatgacctttctaagttcactatgaatataactatcggagcgaacggattttttgaatacgaagatttgcatatgttttggaaaaatgacggaatcacgccgtattttataaaagttgatcatagtattgtaggattcttattactactggaacgtccgtttttgaagaaggaaaatgattttggtattaatgatattttcatattgaatcaatataaaggaaaaggaatcggtaaacaagtagttgagaatttactagaagagaaaagaggacaatatttcgttatcgaacttctaaaaaatgtaccagcagtgtcgttttggaagaaagtatataaagaattaaacattgaatttgatgagagagcgcagctaattgatgatgaagaatgtcttgttcaaacgtttaaaatttaatgaaattggtgttccttttatattactttgaaatttaactttatcctgctatttgcgggcagtaagaccccactgattaaagtttcactttattttgaatataccgtttccccttgaaaacatattacgtatcgcttatattttcatatagtatttattttttaaacgaagcaatgaacgaaccagggggcgcagtatggcaattaacatgaaaacaatcgaagaatggattgctgaatcaaatgcaagacatgaagaagactttggacacgttgtggaagaaatgaaagaagtatgtgtcggacttgataacgcgacattaatttatacgaaaaatgtattttgtttcggtaaaaaagtagaagtctttttcttcttccaagaccatgtcgtgattggacaagaaaaagacgaatatgttgagattgaaaaattaaagtatgatgacattacaaatagtaacttaaaaacaaatgacaaaaatactacgttagaattaaagtttgctaacggacaatctatcaatttagatagtttaaatgataactacggtacgaaaaattggttatttgctagacaaattaagagtatttttaagttaatctagtaaaaagagcagacctcaataaaatgtaccctatagaatagacacttgaaaaaagtctattctatagggtatttgaaaatgtacatatttattcaagcgttaatgtacatatttaagttagcatttatatttttaagttcaattcccctactcgttccttatcttcatcaccaacccaacaactaaataattcgaaatagtctctatcttccaaataaccttccataaagttaaaagtttttctttcgcttctttttttcctttacattttgccactcgacaagttcaattccccaactagttgaaacctcatatgtgtaatttgtttggaaatgataatcttgtacaatttcaagcatactttcatctgaaaaacacggtccaaaaacaattagattattagaatccggatccgttaacggaatttctacattacagcctatgtaacttgctaaactcattttatactcctccagtattcgtataaaaaatacttcatagtatatttatttacttaaatataaaatccctgcctaaacgaaaaagttttaaatttttatcgtttattaaccatctataactgaaaacatatactatgatgaacgaactcacaaagcataagaaaagagagcatttacaacactctcttttcttacatactctatggaactttacaaaactgaatcaatgatttttattattatattttattacatatacttaggttgtactattatatgtaactctctctctgtatccgcttttttcggatgacgaaaataattaagttcgtactttaacactttatactcaaccatcccgattttaatccctttcgtttcttttaatatagctaataaatcacttacattttcatcatatgactcaaaaattttcgcgccgccctctccttgaaagattactttcatatattctccaccaccttaatttattgatgtggtaaatgacgcgtttaaaacgattcattctttatcctaaaattttcatatgaaaaagaacatcctttccaatcgaatgctcagctttttactaattatccatgttaaatatttattcaaaaacattatatgtattattttttaaattatgttcgatatccattattaaagagtaaatatatgtaataaacttgcataatgaaaaccgtagaatatccactttcgttgaaataattataatccataattttccattgtaattcttaatatttaaatgtaatattgtattgtcttactatctatttataactcacacactaattagaaaaagggaactctatatgagttcccttttctaattatgattacagtcattatttcttttctagaaatttaaatgtatctttaaattctttattattcactttaatatcagcatctttcaataaatcattgactacttgttgtttccatttacctgtcgtatcttgtagtctttgttgttctatatctttacgaattttatcctttacttcatcaaatggcttcaattcttttttatccgtcactttaataatatggtaaccgtaagttgttttaaccggctcacttacttggcctgcatctaatttatacgcagcttcctcaaattctttcactgtttgtccaggggcaaaaccagatatttccccgccctgttcctttgaaccagtatcttctgaatactgttttgctaaggcagcaaaatcttcaccattatttactttctcctttatttctttagccgttttttcatctttcactaaaatgtgacttactttcatttctggtttatagttatctttcacatctttatctgtaactgttgctttaattgctttctcaaatgcaatttctggcttcattttttcttttaattcatcttcatttttcaacccaagttgttctaaagtcgatttaaagttttcacccattttatcttttgcttcttctactttcttttttgcttcctcatctgaaactttatatttatctagcaatgccttacttaacatcatttgatataaagtactttctccatattgttgtcgtaattctttacttaattctttctctgtaacatttcctacttttgatgttactacgttgtctgaggaaccacatgcagataatgctagcatcatgcatgaaataattgttccaataaatattttcttctttttcaattcaaatacctcacttttatcattatgcaaattaactatacacagtcattgtgaaaacagtgtgttttctacatgtaattcatttcatatgagttgactatgtatcatgtattttcatttttaaatataaagagccttcttactatgcatagtaagaaggctctttatataattctcaaaaaaatatagcttctatagttgcttaataattacatgtttttcaggtatccaactattctgtccgatatctaccgcatttcccactctaccccacactcgaaaagatgtcgatccatctatgtttcctttataattcatacattcaggctcttcataataatttactccgtaaccgacaggatattttgaagttgcataaaaccatttcacattaaaatgttttaaatatacccactgcttatcgttccctaaacaaatcatatcttgctcaccgcctccccaataacctgctaagattaaatatggaattttttgagtgagtgtacctgtaaattgaggattcatgaggttttcatataaatttattccatatccatcaggatatttcgaaactgcaataccaatgccatttggttgctgtgtatacactatgttagattgatttgctttgttcgaatttataaaccaagaaagtgacttatttcctactaatcgattcagatcacatttcccaatcccaggaacattccctgaatccgtatattgccacatatcgcatggatatgctggcttattccctccataacgagggatccatacgaaatcagcttcaatattacgtgctccaaatgatagatacgtgtgatgccctacatataatcctactttttccgcacctaaacggcgtaattcatcaataaatgcctgtgtcccgccttgcatatctaccatcgtttgaacttctacgtccgctacccaaaacttagcagattgatcaccacgattccaaaaatcttgtgcctctttctttgcatcagcaatagatataaaacggcaaaaagcataattaccgaatgggatactatgctttttcatttcactaacataattttgatacataaaatccaccgtattagagccatcttgaactctagcaatcactaaatctagctgagatgctgcaatatcccaattgatagttccattccattttgaaatgtctacaatataccccatacattccagctccttttgaatgtcctattcatagctagttttattgtaagcctcagctctctaaaactagctatctataatataagtaaaaagaatctttactgtttttcaaaatatattctctttcagaaatatttctataaactttaacatgtatgccacataaaacattcgaaatataccctactattcatttattatgtaatctcgtcctattaatcatttttacagatattagaaaaaaatccctgttttattaaattataactttcagtatcgatttcctttcaactaaaaaatttcatccctcattttctatatattcttaagtcaaaattactacctctacatgaaatttgagatttagaaaaatttaaattaattgaagtttactccttttaaatcacaattttccaacctgaacactattggtgcataaaaaaagacattttctattaatgaaaatgtctttttacagtttaataaaacaactttggtgctaaatctgtattttgtaattctttattttcactgctcataacacaacttgtggaaaatagaattgggataccacaaatctcatctttcattacatcacgaaatacattggcagcaacacctgtaaacgtttgacataagttagaaatatcgtcattgaaaaactgaatgacttccgcagcgaaaaccggaaagacaacattcggtccgccagggaactgaggctgtaccacaacttgttcaaaataaggattattttctagtgctacttgaaataaatgagctatttcaaatgcatctagtggacaaggaaatggatttacaatttcattctcattattcgttacaataactgtcacacttacattcccaaattgtacaaaagattttaaaagagttactaatgctctcgctttttcgttgcttaacgcatgcactaaaataatataattaccaccaacaggaataagtggcccaactgtaacagttggatcagcacctattgaatttttcaattcattaaaatatgtgatccaaggtggcgaaagctgaacttgtacattcccttccaatattttacactacctccttatacaattcttactagcataatatgtaaaaaactaaaaaatgcatcagttatattaattaaacatcttatttcacattctcaattttccctttacatctttaagcacttttactactatgaaattctttattataagcaaatccactgaaatttcatattatactaatacgactctatatcctttaaattataatactcaatattaggagctgatttcatggaaaaaaaacctatcgtgttcaaaatcccaccaaattcaaaactaaaagttacatttttcggtccttgtaacgaagtaattacaaatgtgtctataattaatcaactatgcgcccctaaatgtcaaactatcacgcaatatccagactttaagaaatatgtaactgaagtacgatcgttatcccgttgttagtccgcataatgcacgattttcacaactttgttacctaaaataactgagaaagaaaataactgcattcctagactaaaattactcattttatgatattccattgataattcattgattttttacacgtttttattaaaagaacatatattatcgtatggagattatccactcataaaacctatctttctttggagcgtacttattatgtatgctctttttttatataaccgtcccccttctaaattgaccaacaatatattaaaattctttatatactcaaggaggtcaaatatgttcaagctgcatccgatactactcatcttaggattgattttgtttttatatagtgtaatcgcctttatgttattcttttcagtgtattagcattacctatacaaagctgtgttcaatatgtaatttctatatagtaaagaaaaaacgtaatgatacgatcttttatgtattccgtctttctgttcaataagaaaactagtaaacttactaacaatgagttttcacaagcatgttacttattattctgtttattatctgaagaagattgaaacctctacaaattaaactacactttacctatttacttatatattttagaaaaacaataatattcccccaccatttggtaaggggattaactaaacctactaaaaaacatttaatgatctgttttatttaattggagaaggaaatcttgctgcttcaaaatgtgccccatcttctaaaggacttaaaaccccatctatactactttgtgcataaatctcaacttcatcccctgcattcaattgaacaatcgtcgaaacacttacgacatttccaaaacttattggaccaaaaaagtcattatcgatagctatcgctgcgtttccattcacacgaatttctacacgcgctctataatttaaagttggatcgtttggaaagaaaccaatcgttccaataatagaatatactcctttagtcttcggcgtaaaaatagatgttgctggattatactcattcgctaaatcaaattgttcattttgaaataacactttcacaaaagtattagcaggaacattttgattcacagtatttctagctctaaatgccgatgctctaacaagattgtccttattatcatgacacttactagtgttcttacaacaatcatgatgcttctttttatactccttacaatacttacagtagtaataacaagacatactaattcccctttcaaacttattactacatattatgtaagattgatttataaggtttggactagctatttttcttattcataagggcgctattaatctgcacccttatttatataaaccacttcattccttactagttataagttgtatatagttccatatggaatagtaagaaaagaacttccgtacggtgtaacatgatgtactggataaaaatactctacggatgagtaatatggttgtactccttgctgctgcatttgttgttgcatttgtaatgcttgctgaatagcttggactgtactttgtgctccactatacgttatagacgtaccatacgctggtcgcatgccagcttcagaattaatatatgaataaaacataattttcaactcacttccgtataatttgttacacattatattatgattctttatttcattgggtactataatgctagtccgctcgcttatattcaaatgacaaaataaaacagtagctgctagactactttgaattcttcttattaccaaatgaaatgatatacatattctcctgttacacgctcatcgattccagcaaccctaacgaacctaagtaaatccgccccttgaagaaaatatatcgacatcgtaaccggtacttgtgaccacatgaattgaaaaagctcattcaccctctgattcgtcgtaatgattaaatcatttacaggtccatgattccatgcagaggtttgaactgaagtgaaagaaaggtctttcccattaatcactattcttgccacgctttgagttatgtccacaataatcccctccaacattacaaaaattggaccttttttagttcatattattataaatattcttgactgtaataaatgtttaaggcaaatccctaataaagtgaaactttaatcagtgggggtcttactgcccgttaatgcgggatacaatttttttattcatatccctcaattcccattacaaccatataatttctaacctgattcaatttttgtaaaagttgaaccagcaaatgtaaattccataaaagtattagaaaaattaaactttacttttgaaggtactctgagaaaaagcgaaaaatcagctggaaagcttatcgatttaaatatttattcgaaattaataagcgattaattttagtcactctgcccatacttaatcaaagtgtcggcttctttaatttctgtataaaattcaaaaatttgacacaatcctggaaaaagcttataaagaaaagtgaggttccgttattttcacacttagtagcgcagccatgttacatacaattttataagtgtgaacgaactacaaaactaaaaaacaaataataagtttgcaacatgtttgcaaatgcgaattttgcatataaattcgtgtgatattgaaaggagttttacttatgaaagaaattaaaacagaacaagaattcaaagacatcatcgcaagcgaggagccagtagttgttaagttctttactacatggtgcccagattgcgtacgtatggacaactttatcggagatgtaatggaagagttcaataaatttgaatggtattctattaataaagatgagtttccaagtatcgctgaagagtatcaagtaatgggtattccaagtttacttgtataccaaaacggtgagaagctaggccacttacatagtgctaacgcaaaaacagaagagcaagttactgagtttttagaagcatactaagatgaaagccctctggaaaatattttccagagggctttcatctgttttcataattatcttttgacgtttttcctcgtttaatgaattacaccttgtcatgataagaataatatgtagtaagaaaagtattcgtttcttgatccatctcccctcctatctctttagtaaatagactctaattaggtttacaccctgactttgtacttttcaacatatttttccttcacgaaactttgttatccccttcttaaaaagctataaaacgtcaacaatgtttgtatagacccacacgactttcgtttgatactctatttatagaaagaaattcctttaaagaaaggtgagtgattaaaatggatactctttctcataaagaagctgataaaggcgctattgtcagcattatggcctacatatttttatcctctatgaaaatcatcatcagttatattaccctctctagcgcattacgtgctgacggtttaaataacttaacggatatcggtgcttctttagcgatattaattggtctaaaaatatctcgtaaacctcgtgacccagatcatccgtatgggcattcgcgggccgaacaaatcgcatcacttgttgcgtccttcattatggcaacagtcggattagaagttgttattagtgccattcaatctttcttaaatccgaaacaagcagcgcctaatatactcgctgcatgggttgctttattttctgctgtcgttatgtactgcgtgtatttgtatacgaaaaaaattgcagcacgaacaaaaagtaaatcattagaagccgctgcaaaggataatttatcagatgcactcgtaagtattggtaccgtagtaggtattgtcggttctcagttccaaatgcctattttagaccctattgccgctttaattgtcggtcttattatttgtaaaactgcatgggagattttcgtagaatcttctcatatgcttacagatggaattgatcctgataaaatggaagaatacgctgatgctattgagcatattggcggtgtggaaaacattgtagatattagagcacgtatgtatgggaatcaaacgtacgttgatattacaattgaagtagatgctcgcatggatgttggagaaagtcactgtattaccgacaacatcgaagctatgcttcgcaaaaagtttggaatttaccatgcacacattcatgttgagccaatgaaaaaagaacctattatgacataggttctttttttatgaacgttttatggaatataacacataaaacgagccagctaccaccagctgcccatcctgctaatatgtcagatggatagtgcacgccaagatatattcggctaactgaaatagataatacaacaaagcttgctataagaataattaacaattttttatgcaacgaaatacgttcttcagtaattgtgacgtatgcaataaatcctaaaaaagcagtagcattcatcgtatgaccgctcggaaaactatatccagttgcagtaacaagctgcgtgacatcaggtcttgctcgttcgtaccatagtttaagcatactgtttaaataacgagatccgtagtaattaattgttagaagtaacgcactaagcaacttttttctaacgagaaaatacattacaagaataatgagtaatggaaaatatattcttttggaaccgataaaagacacccaagtaaaataggtcgtcaaataatcgtttcgaaagctttgaataaaatgtgcgactatattgtcaaagttctcaatacaagcggtatgatacgaaagtgataatacgacaaaacaaatgagtaacgtaaaacttagcaagtataaatgtcgatatcgtttcacatacataacctcactatgcaaaaaaaatggagcggttgttttagttttcctctccatttcttttttatgcatagtttattaaaaaatataattattaattttttgcttcatctcagggatatcttctcttgttacagtgaagcgaataaccttctcatcaagatcaagtgcctcagcgaataaaccagctaatccacgtgattttctatctacttccataattatttctaatcggtcgtatgcacgtggcaaaattaataattctaattcatctaatctgccgtagtactctccagaaaccggaataaactcaaattcttgtgcgaatggaacttgtttacgtaatcgatgcggtaattcttcacattctatatgacgtgctttaaaccctaattcatttacactatctaaaacactacttaataatgcattaggtaacacttgaacgtagtcgcggtcacttgggtctatactacgtttaatatcaagacctgtatgaatccaaaccgttttcataccaagtgtaagtggtgcttcaattggcattggaaaagaaaatggaatgtcaactgtttcatttggttctacagaaaaaggttcggttaagcgtactcgctctaaatcatatgttgctgttacttttttatcatccacttctcgtacatacgacgtcgataatgttaagtaaatgctttcaatttgttggctaactgaacctccagttatatgaacctttccaactatttcttccccaacaatatactcatctttttcaagaacagtatctacctttgcacttccaataccaacgcttgctaaaaacttttgaaacatggagtctccatcctttctaaagcagaagctacatcttgttttaaatcttgtacattctcatagtacggcgtttttatttgtaacattcgcataagcatttcacgattataattttccaaagttaattcttcgtaccatggtttttcctgtttttcattagattcatatcctgcatataataaaaataatgagaaatgaccgagcgcataaaagtcgctacgaaattgaacttctcgcatcaaagcttgttcaccttcgtaagttgtagctcgctcatcatcctcacctttccatttagctaatccaaaatcaataatactaatttgattttctttcattaatatgtttggaatgcgtaaatctcggtgaataatgccttcactatgaaacaccgatacaatttctaatatttcatataaaatttcaaaaacttcacgttctgtatatacatacccatctatgaaaatataatcttcaaaatttttaccagacatgtactccatcacaaagaagctctttttctcccatatgaaatgatcatatagactaggaattgcatgatgatttaatgtttgtaaaatcattttctcttgttcaaatgattttctaccagactcatatctttgtttactttgtcttaattgttttaagactttatatctatttatctgcaaatcattaacgacatatgtaaccccataactgcccattccaattactgattcaattttataatgctctgcaacaattgtattttttcgcagtggtctatcaaataatgctagtacacgacgccatttcatcagctacttgaaaagaagctacggcttttacgttttcttttataatgttgatgtccataaccagatgaacgtcgtttataatcgctacttgaatacgagcgccctctacgacgataatcactacttgaatacgaacgatattttttctttcctaataaagaatcaataatttttttgaacattccttcacctcttgagtaaaatttccttttcattatatcaataattattgactatacttgtgacaggtttgtaaagagtaaaaaacgacgagttatgcccgtcgttactttcattcatcctcttcatcaaaaacttcatcaatcatgcatttctctaataaatactcaaatgtaatatctgcgagatcttcaatttcttctcgttttgggacgtaccctctttcaattagttgctcataaaaaaactccgcaatctcttccgtatcaatcacgacttcaatttccttcatgagcatcactcctttatttctgttttatgaaaaaatctcaaaattatgtatatgagattagaaaaatagattttatttttttataggtcataagctttggacgagatgcatacgattgtagtacaagctattcaaagggggaaataataatggaaaatcaatatgaagtaagacaaacaaaagaagagttcatgcatgaagatcaatgggcagactctcttataaagtggctttttatttttttaatagttgtaggcataccttatactgcatatgttgttgttcaatttattctctctttctagttaactattttttctctgtcaatttaactaaataattatgaacaacatccattacaattttatattcttcatctttaaatgtatcgaacaataattgataatcgttataaatgtcaagtaatccatcaatgatttcttgacgattcgtcttaacactcacttttttcgagttgttaattgactttaactttcctaaatctaatttattcatacctgctttatcttgtttcattttcttcaaaattgcatttgccgtttgagcattggcgagtaacgttaaatctgattcatccgcttctaaccattcaccatccgtaatccgtgacaattcataaattgtatcttcccatgcgtcattcttatatctccatacttctgtacgaaaaccaacaatacggaaaacatctttatcatatccagttacttgcacaagatcaccaaacgtgaaattataatttaattcaatccactccgtatcgccctttttcatatcttgctctgtaacgtgctgcaatgtttgctctacgtaaaatccatcgtgattattgacttcgtatacataaactccatctaaaaccttcatatttgtgattttcccaacggttccatatagcgtaatcacgactatgtcccctacgttgtatttaggttgtttttttcttgccatctctatctctcctttttttgacgtcgtgattttgatatcagtatatgcaacctacataaaaacgcttatcacagaagcttatattcataaattttttcaataaaaaatataatcttataaaatttacattacacttaaacaaaagctagtaactagactagcttcaaatcaacaaatttcataataaaaaaacatacagaatacttcactttaaataaagtaatgtattctgtatgttttcaaatagtttttatctatcttgtatgtataaatcccaggcttcatcaaatatagacatactttctagcattccgctcaactctaagtatgaactaatttcatcatagtcttcagattgcttcggaaaacttaaatcatcatacatcgcctctgctaaatctgaaatttcatttctaaataaagctgcacgatgcttcatcatataatggtaaaatgtctttttcaaaaatattccctacctttctaacttgggtacattatacaaggcaaaaaagaaaaaaaccagcataaaagctggttaaaagtcgaaataatttctttttaatagacgcggtcttcccattaattcttcatatgttagttgttttggtaaatctttcgtgtaaattaagaataattgatcttcaatttcttttactgtatggtctgattgatagtccatcccacacgaggaacaagaaatacatggtgtctcttggatttcaatggctttcgtaccatctggtaattcccaatatacagtattcaagctttctttcgcttctgtactgtcacaccacatacaattcatactgcatcaccctcagtttttttgtcgttttcttctaacttagccatttgtgcttgatattttttatcttttaattgatcgcgcttatcacgtttatcttttaaagatgcatgagtatcattatcttcgtagtctttacgacggttcatacgctgtaagtcgtctggaacgaggttaaatttcttatcgctcataagacctgcgataccaacatctgaacgtttttcttcgtagttcggataaatctctttaaagtatccttccgctcttcctggaatatagctctctggctctggatacgtcgtaataacaccttcaaagttacgaagtacaactttatctgcactttgtgagattaaatagtttggttgaagtgcaattttaccgcctccgcctggcgcatcaacaacgaatgtcggaacagcataaccagatgtgtgtccacgtaaaccttcaataatttcaagacctttagatactggtgcacggaagtgaccgataccttcagataagtcacattgataaatgtagtatggacgtacacggatttttactaagtcatgcataagttttttcataattggaacgctgtcgttaataccagctaaaattactgcttggtttccgactggaacaccagcattcgctaacatttcacatgcctttttcgattcttcagtaatttcaatagatgtattgaaatgtgtatttaaccatactggatggtattttttaataatgttacataagttttctgtaatacgttgtgggaatactactggtgctctcgttccgatacgaataatctcaacatgcggaacctctcgtaaattttttaatacatattctaaaattttatcattaattagaagtccgtcaccaccggagattaatacatctcgtacttgtggcgtttcacgaatataagcaattgcatcatctaattgtttctttggtacacccattccaatttgtccactaaaacgacgacgtgtacagtaacgacaatacatagaacattgatttgttactaagaatagtacacggtccggataacgatgtgttagccctggaactggtgaatcttcgtcttcgtgaagtgggtcttctaaatcatattttgttttatataactcttccgaaatcggtactgattgcatccgaatcggacagcgtggatcatcaggattcattagccaagcatagtacggtgtaatgtttaacgggatcgttttcgttgaaattttaacgccttcttcttcttcaggtgttaagttaatcacttttcttaagtcatctaacgttttgatcgtattcgttaattgccaaacccaatcattccattgctcttcagtaacatctttccataattcgatatccttccagtgacgatttggtttgtatacatcatgtaacattgctattccccctttttatacgctcatcctttatataagcaatagttatgccaactttacattgttgataagtaaatgtgcggagaaccctattacataagcgaaaaaatatttttaagcgttgtatgaaatcaatacttaacatcatattcattactttttatatatgtaaacgctcttttattggtgcaaacacacaaaaaccgccgattattcggcggttttgtcgtacttgctcagtttatattgaagcgtttgacgagggatacccaacatttttgcggcttgtaatatattcccttccgtttcaatcaacgcttgatctattaattctttttctgtttgatgaagtgcttctctaagtggcattatacccttcttcttcgaaaacttctctttccgaaatgtacgtggtaaacaattggctgtcaatgtattcccttctgcaataataacagcatgttcaatcgtatgttttaactcccggacatttccaggccactgataagcttgcagtctatctttcgcttcctcatcaatttgaagtacaacttttttataacttttattatattctttcaaaaaataagatgctaataatagtacatcctcagttctttcacgaagcggtgggatatataatgaaaatacgtttaagcgataatataaatcagtgcgaattttattctctcgtaaacatatttctggaggctggttcattgcggtaataacacgaacatctacttttctcgtcttattatcaccaattcttctaatgactccatcttctaacactcgtaacatttttgcctgcaaatcaagaggcattgaattcagttcatctaaaaataatgtaccaccatcaacaagttcaaatagcccagctctttcaatcgctcccgtatagcttccttttgtcgttccaaacaataaactttctaatagcgactctggtaaagctgcacagttttgtgcaataaatggcttgttttttcttttagaagcttcatgaattgcttgtacgaacagttcttttcctgttcctgtttcaccatatattaaaacattcgcgtctgttggtgctactttttgtgctaactctttcgtctgtttaaaccgcgtatcatttgtcactatcgtctcaaatgcagcgtgctttttaatcactttttttctagatgatcgctttattttcgactgtaagtcaacaattgtgtcagtaagtttttgaattgtagagtaatcctttgcaatttcaacagccccagcaatattcccatctataaaaataggtaacgtcgtatttactgtacaaacatcttcaccatttaaattttgataatgttgtacctgatgtacgataggtttttttgtatctagtactttcatcaatgtactcgtttcccttgataaagacgggaacgcttctaacagatgtttccctaacactttttcaatcttggatccatcgtgttttgcagctacagaattataaaatattgtaattccattttcatctacagcgtgtatagcctcatcaatactgcccaaaatcgcttcaatgacttcttgtgtcgaaactgctagcaatgtcatcccccctcttgccgaaaatccagcaattatatgccgaattttcggcacacctatgtgcgattgtaagcatgacgattccgttctataattttgaccaattttatattttcattagataactcgaaactctaattagtacaactttttcgaacacccagctccacctaactgttttgctttacagccaaattttgagacggaagttttactgctttcgaataactagatagatctttcacccatatattcatatcttccaacttatcgaaaatgtagcaattattcgccagtcttcctgtatacgtatagcctaattgatgaaaggcagcattcattccgaaagaaagcgatcgagcaattgtataggagcagaaaatagatctttctcgaagctcttcctctaatttaattagtaaacttttcataaatccatgtttacgatattcaggtaaagtagcacaattcgttaattctgcatttccttcctttatgttcatttctgcagatgctgtactaataatttccccctcaaattcatacacgtagtaaattgtatcgtcttctttcatcgtctgtaatacataacttgcttcatttaaaggtgtcggatacacttcaaatacttttccgaagacagttgctaattcttctgcatcttcttcagtcgcttttctcagcaaaaatttctctggaactactttttcttttatttcttttccttttacaccgcttaatatagtatcttcctcagtccaatgcatactatttcgtctttcatcattattatatttcacaaaaaagtatgcatcgtgtccttgaaaataatgaggtatcgttgcttccaacacaaaaccgaaagagagccatgttgaaacatgctctccctttcctttaataatacatttagtgaaagaatgtttctctgctagttcgtcaattgtctgtataatactttcaacatttcctgtatagtgatctacccggatacgtttattaaaataatctaaaacgccttctactgtataacaattcgtctgttctctaaaagattcatagtatttcattttttcacctcacaccaatctagtaatgtacatgcaataatttttgcggcagctatcattttatcaacttctatatattcgtttggatagtgtgctactttcgtctctcctggaccaaatactattgttggtacgtttgcaatttgtgtaaataaacctccatcagtcccccacggagatgcttcaataattggttcgttcccttcgatttcaacaaagttatgatgaagtgttgtaatgagttcatgattttcttctaattcaccaggaacccatctcgctccaaaccattctacttctaccggattttcaacaaaccaattgtccacatcatttaattcaacaatccaattctcaaactcttcttttgccgcctctatagtctcattcggcgcaacaccgcatcttccttctaaaattaattcatcgggaacagaacttggccaactccctccttcaattttgccaatgttaattggaattggaattggaattcctttaaataacggatctgtaattcgactatttcttttctcctctagctttcttacatgttctataacaaacatgcttttttcaattgcactaaccccttcatagcgcgttccaccgtgtgcagctttcccttttacacgtagacgaaaccacatggaaccttgttgtttcgggaaaaacttcatattagtaggctctggaataatgacaccatctgctttatatcctcgtaatatagttgctaatgtccctgctccaccactttcctcttctattacactttgaaaatagatgtctccttttaattcaatactagattcaatgatcgcttccatcgcaagcataagtgcgacatttccgcccttcatatccgtcgttccacggccatatatacgatttcctattttctcaccgctataagggtgatgttcccactgattcacatccccttctggaactacatcaatatgcccatttaatatcatagatttcccgtcgccacttccttttaaagttgctacaatatttgggctatctgaaaaacttgtacggggtgatacaaaataaggatgatctttcattttagaaaaggagggctcccatatatcgagatctaaacctaattcacgtaatttttcaatcacaattgcctgcgcaccgctttcatcaccagatacgctcttttcttgaattaatcgttttaaaaatttcacactttcctcttcatggctctcaatataatcacaaacttgcttttttaattgctccatatattacatctcccttcattcaattactagtaagttagaactaatttgaaaatcagcttctgtatgtcgttttacatcttctactgtgtatgggctcattaattcttgtaatataagtccactcggagttacctccatgactgccatatcagtaataattaaatctacacatttctttgaagttaatggcaatgtacactctgaaacaatttttgcatttccgtacttatcaacatgattcatcacaacaacgacccgcttcgctttttgtgctaaatccattgctccaccaatacctggaacacgttttccaggtacaatccagtttgctaaatcgccattttcacttacttgtaatgaaccaagaatcgttatgtctagcaaaccttttcgaatcatcccaaacgctgtgcagctatcgaaataactcgctcctgttataagagaagttggtaaacctgctgcattacacaaattttcgtcttcattccctttacttggcgttggtcccatgcccacgattccattttccgcatgaaacataacatttatatcgtcaggcaaatgatttggtacaagcgatggtatgccaatacctaaatttacaatcataccattttgtatttctttcgccgcacgcctagcaatcttatccctcacttctacgcccatacccatttccagttcactccttccgacggtacaatataatttacgaaaacacctggaacgacaatttcctctggatctaaacttccaagcgggactatttcttccgcttctacaattgttatatccccagccatcgctacgtgaggattcatatttcgtgcacttttgtcaaatacaaggttaccaaacggatctgccttttttgcatatacaattgaaacttcagcagttaatgctgtttcaactaagtaggtcttaccattcatttcaactgttcgttttccctcttccacaatcgtatcaacaccaacatcaactaaaacaccaccaagaccaacgccaccagcgcgaatgcgctctgctaatgttccctgcggagaaaactcaatttgtaatcttccctcgtttagttgccttcctgcatttggattggagccaatgtgagaagtaattattgatttaactctttcatttgtaacaagacgaccgatacctacatcaggaaatccagtgtcatttccaattaaatttaaatttgtaacgcctttttctaaaattgcctgtattaaagatggaggggatccaatccctccaaatcccccaaacatcaatgtcatatcatcatggaacaaagaaattacttcctcaatttcttttaatttaccgaatgtatttgtaatagttgtcatgcgatactatgccctcctttttgcatcatctcttccacacttttagagaaaattgaaagtaattcatctaactcggaatatgtagttgtcattggcggtgctacaagcagtgcactatcttcttttcctgcttgccctgaaactgcttggtataaaagcagaccatttttagctgcaactgaaataagctctgacgcttttgtaaacggttgcaattctactccgattagcaacccttttccgcgcacatcagcaatgattgtcgattgttgctgaactttctgtaagccttttattaaatactctcccttttctgctgttttttcaggaagattatgtttctccatatattcaataacagctaaagccgttgctgcagacaatggatttgcacttaacgtatgaccgctcattactgaacgtgatccacgtaatattggttccataacacgatcacttacaactgtcgctgccatcggtgtatatcccgctcctaaccctttaccaagtgtcataatatccggctctacgccccaatgctccatcgcaaaccatgctccagtacgaccaagcccagtcattacttcatccgcaataaataaaatatcgtaatggtcgcaaatctctttaatgactttataatagtctttcggcggaacaaccgcgcctccagctgctccgataatcggctcagcaataaaagcagcaatatgctctgcaccaattctttcaattgatctttctagttcagtcgcacatgccagctgacaagttggatataccttttgaacaggacatctgaaacaatatggagctggtatagtcggataatcttccaaaatagatacgaaacgttgtctacgtagtggatgcccagacattgataaagcacccatcgtaataccgtgataactcatccatcttgataaaattttatgtttcccttgaatacctcgctcttgaaaatgctgaattgcaattttcatagctgtttcattcgcttccgtaccactatttacaaaaaaactccagttcaaatctcctacacttaaatcacttaacttcttcgctaatttttcagctggttcactcgtaaactgtgatctataaacgaaagcaatctcctcagcttgctttttaataacgtctgcaatctcctttacgccatgcccaatacctgccgtaattgctcctgacgaaccatcaaaatatttattgccattttgatcatacaaataaacaccttttccatgtgaaatcattggatacggctgaccaacaagtggtttaattaagtaatcgcgcatagcgctcccccatttctccaatttgtatatatatatgaagaaaattgacgtttctttcataaaaaagaatcctctgcaaaagcagtgaatttatcaaaaaactattataaaatatacaaatgagtgcttaaaaaattttataaaacagaaaattcagaactaaaaaaccgaagaccaacccttttctatacgcccaaatgaccctcctttttatatgaaatgactgcatcaccaaatgtttttatagcataatgccagctgtccttaaataccgacattctgtacacttcgacggaactcccgttaaactccttcctattatcctactttaaattgcatattttaaaacaaatttcgacacccaccttactaatcaattcagattcctattcattatgtaaacttttcatttttaaactataaaaaaagaaccgattaaccacactaatcagttcgtcatgacgctctcttatgggttaatactgtcaattgctaaaataaatagaaaaatgaagtttacaaattcatcctacagtctataacacaaaaccttttcataacttcattcacaattactatcgggatatccctatcccgaagtggcactcctttcctcagattcaaagtatctttcctttataatttatgtaggacaattatcactttgtatgtgtatttgcctataattaaaaaaatccctagttttctagcgatttttggacatgtattcaatatgttaattgaaatgcactttcaatttggcatttattttactttcgtacagtcatatgtactgctttactctgtgaaattctcgtaagcaccagcacctctttatgaaaacatatttgttgtcactttttaattttccctttataaaatcattttttttgcataaccgctttcttgcttcgcatatagttttaatgatgacaaaggaggaatgttcatgtctcaatctgaaatcgaaaaatatggacaagaagttacgcaatacgaacagctcgcacgttactatcagtttcgtaaccctaaaaaatatatagaattatatatgaaatattacgatgcactatcaaaacttgtacaggcgtatgaaacaagagactcacaagaagctgctttaccatcacatataagaatttttcatgccgatccaaatataccggcggttgacattttagtaaacggacaaaaggttattaaaaatatttcatttaagcaattcagcccttatttatcattagtgcaaggtaaataccgtatagatattgttcctgtcggaaatgaaactccaatcttttcagcgttggtaccaataatgggaaatcatacttatactcttgctgcaataaatagtgataatcacctacaattacaacctatacttgataatacacatttaccagctggtcaagcaaaaatacgctttgcacatttctctccagatacccctgttgtaaatgtagatttaaaagatggagatcatttatttgaaaatgcactctttaaacaaataaccgattttttgcaagttagccctggtacagcagatattgaaatttcactcgcagataataaaaacgttttattgactataccgaaattcaatgttgaaccaaatgttatttatacaatttcaatagtaggttattcaactaaagatcctaaattagaagccgttatactcacaaattaaaacagtctacaccattcatttggtgtagactgtttatttttgaaatgcaatttgaaattctgtccaatcgttatctgatcgacacataatggatccattatgtttttccacaatttgtttacatacaaacaatccaataccagttcctaactttttagtagttacaaatggttcaaaaatcgtttctacattttcagctggaatcattggtccattattttttatcacaattcgaatagcttgatcttcttcaaatacatcaatgataatttttcgttcttctttcattgattcaagagcatcaattgaattcattaatatgtttaaaaatacttgtctcacttcactccgataaccaacaagcggaattggatacggtaaattcttttcaatcaaaacattcgcattgaccaaactcggatataagaattgtataatgtcttgaaacaagtcattaagccaaaaccgttccgattcattccacatttctttttttgatacgagtaaaaattgcgaaatacgaaaatttaattgatctaattcatgcgaaataatatctaaatacgataaactcggatgatctgcctttaataatttgacaaaccccataatggaagtaagcggattacgaaattcatgtacaaaactagctgacatttgtcctaaaatcgtcagtctttctttatgtgtttcgttaatatattgctgtttttcctctaaattcttcgatataatttccgagtattttaaaacggtataataaattaatttgtcaaaacaagtatgtatttttgccataattggtttcaattcacgagcgctaacatctaattcacacatcgcttcgaaaagttcatttcttcccacgtttgcgttataaacaaaatctccaatattcgcatctgctccagcacgttcaatagcaattttctcacataacggttgaagataatttatatctttatcttccatagtaagttcgataattaactctagtaaatcctctccattttgaactacttctagtttaaatggatctttttcggaaattatcattttgtttttccagttctctacgaattggtgcctattgtttttcaagtgtgaacaaaatatttctttaatatccttatcgattggaaaaacctccattccctccatttccatacgacgaataccctttatattttgaatattaacacaaaaaatacgattcgttaatagatttttgtcacattttgttaatttctgttgataaaattattttttctttcttatttaactaattgtatgcaaatcccctttttccttcacatattttcattatttccgtagtcaaaacgactttttttgcatcatttttaattcttgcgtacaatagaaaatgaaaggtgtgaaaaatatggtaaataaaaatgtggaagattatctccaagaaggcatttacggccaaaagcaaaacaaaccagaagaacgtaatatgtatttaactacattacgtgagcgtgtggaaatcgctttaacgatcggtcaagtaatgcaaagtaatgtatactctgaagtggcgggtagcatgcgcccttctcaatcattacaactcctcctaaatggtggcattgcttacccacatttatcaaaatacattaaattagcaaacgaaaaaaatgttccttttacaattgttcaaaataaagatacaaaaacaccaatcggtttagtattaactcatgctactgctgtagataaagaacaaatttatgtagaagatactattttcaaacaagaaatgaagtaaaagttacacttaattaaatagttactagaagcgtaaaaaacgagtatggaatcgtaaacatttcctactcgttttttagtgcaagttttaagtttttctactttattttttaatacatactaatttcatttctgtcatttcttctattgcatatttaattccttcacgccccgtgccactttctttcacgccaccataaggcatatgatctactctgaacgttggaatatcattaatcatgacaccaccaacctctagctcatcaattgcacgcattgctttaaataaattatttgtaaatactcctgcctgtaagccgtaacgcgaattatttacttgctcaatcgcttcatcaaattctttaaatgtatttactgtcatgagtggaccgaatacttcttggcactgcacagatacatgatttggaacattttttaatacagtcggttcaaaaattcgtgcatcccgcttcttaccaccgcataaaacagttgctccttccttaattgcttcttgaacccacatatcaattcgctctacatctctttttgaaattaaagctgatacatccgtttcctcaagcagtggatcaccaacaacaactgattccatcgctttctttagcttcgaaagaaattcatgcattttcgtttcatgtacaaaaacacgttgtactgaaatacaaacttgtccattattaacaaatgctccccattttacacgttcaattatttcatctgttaactctacatcttcatcaatgataacagcagcatttgagcctagttctaacgtaactcgttttagcccagccttttgttttattccgattccaacttttggacttccggtaaaagtaatagaagcaacgtaatcatttttgacgattgcctcaccaaccgtggagccaggaccagaaatgatatttaaagctccatttggcaatcctgcctcttcaaataactcaactaatgcataagatgataatggcgtttgatcagctggctttaatacaactgtatttccggcagcgattgctggtccaactttatgcgctactaaatttaatgggaaattaaatggtgtaatagcccctataaccccaatcggctttcggattgtatatgcaatacgcccatctgcaccaggtgcggcgtctaatggcaatgtctcaccatatatacgcttcgcttcttcagctgcaaatttgtatgtttgaacagtacgatctacttctccccttgcagcacgtattggttttgcagcttcttttgcaataatctctgcaaattcttctcttctttcatccattttttgtgcaactttctctaaaatagtcgcacgatcatatgcagataatgtattcatttttgtcattgcattttttgcagcggtaacagcctcttttacatcttcttccgtgccttgtgcaatttccgctaatgtttcttcagaatatggtgcatataatggtttatacgtgtttacagatttccaatctccatttatatataaatgctttttcatacttcttctccttccaaatatatgtatacaacaatacttcacctagtgaaaggtttgacttatgtcattgtatcatagcccttatccctcaaaaaacattatgctcaaaaaaactctgctatatagcagagtttacgagctaatttgctcttgtaacgaaatttgtttttcatcttctaaaataacaatcgattctactatctttgtaacttctaatctttttatataatgtccatctaattctttcacacaaaacttataattttcaatttcaatggaatcctcttcagcaatctctatattcttcgttaaaatccaaccaccgattgtatcaacaccatcatcatcaatccctaaaccaaataacatattcacttcactaacaagtacttttccctctagtatcgtcttcgtttcactaaccttttgaatttctggctgctcatccgtatcaaactcatcctgaatatctccaacaatttcttccagaatatcttcaacagtaacaagtccagatgttccaccatattcatctatcaatatagcaatatgtgttctttctttttgcatttttaaaaacaaatcatgaattggaatagaatcgataactaaaataattggtctcatatattgctctactgtcttcttattaacagctttatgttgtacaaattcagtaaaaatatctttaaaattcacaaaacctattacgtggtctttgtcgccatcaacaactggataccttgtatatttttcacgagacattttttgcaaagcttcttcagcaggcatctctttacttataatattcatttcagttcgaggtaccattatttcttttgcaatgcgatcatcaaattcaaaaattttattcacatatttatattcagattgattaatctcaccatttttataactttctgaaactaacaaccgtaattcttcttctgaatgaacctcatcatgtcccttcggcggtttcagccctagcagcttcgtaatgattcgagctgaaccatttaatagccaaatgaatgggaatgcaatacgataaaagaaaattaacggcttagaaacaagtaaactcacttgttcagatttttgaattgcaaatgtttttggggccaattcacctattacaacatgtaaaaaagtaattaacaaaaacactaaaattacagcaaaaatgtctgctagttgagtagagatattccaatttgcaaaaagcgtatcaaacatttgctttaacgcaggtttaccaaaccacccaattcctaaagctgtaacagtaattcccagctgacaagcagataaatattcgtctaagtttgtaatgactgttttgaccgatgttgcacgattatttccttctgcaattaaatagtcaattcgtgaacttctcactttaacaattgcaaattctgctgcaacgaaaaatgccgttaaagcaattaaaacaatcactatacttatactatatatgtccaaatacttttccttacttactttgtaagcaaggaagccacctcctacttaattttattcaagtgaagtaagcattctaatactctaacaaaattctacattagcaaccacctttttatatattatatgcatacataaaaaagatatttatcattatgataatctaattcatttacaatcgtcaaattattctaaatgttacgataaaacatttttatttaaacgaactattcttctcaactcaatttcgtgaaaaaacactttctttgccgattccacacttcttttgtcgcactagaagggaacttacttcatagctcgaaatcattcaacaggatatatataggagggattattttggaatataaaacaccatttatcgcaaagaaattaggtgttagcccaaaggctgttgtccggatcgcacaacaattaaatcttacgatagagaaaaacaaatatggccactttattttcacacaagaggatgtcgatcaaatgttagaacaccatcgatttcaaatagagcaatctcaaaattctcaatctactcaaaaggcttcctcaaatgaagttgaggaattaaaaactcaagttaatacaattgttcaaaacatattacccaatgattttgagcaattagctgatcaattaaacactattacgagaagacttgatcgaatggaagaacaaatgcaagataaggcaaatgatgtcgtcacgtaccaacttttacaacaccgtcgtgaaatggaggaaatgttagagcgaattcaaaaattagaagctgccctaacgaaagaagaacccatttatattactcctgattcaaaaccaacatatgaacgagaaaagaaaccgaagcgccgcaaaatgatttttagtatatttggattataatttttagacccttattaaaataataagggtcttttttaatgaagagttatatcctatacaaatattattctctttattatacatattcacttcgctttatttcgttaacataatatttttactgtattctgcaattaatgcctgtgcatgagcattcccttgaatcacatcacgaaattcttttaaagaatacaaatgcgtaaccccttttcgagcatgaattcttactggtacaccttgtaaagtatcatgaaactgaaatggattatctattggctcaattggaaaaccaagtgtaagtaaatacatatacattctttttgttactgctgcaatgtaccattcagcttttgtttctaacgcatgtataaataaaatagctgttagccttttgaaatgtcctctcccacgagacgttttcgaaatacttaacttgcctatttcatatacattcttcaaatcttttactaaatcatttttagaaaacggatagaaaaactcagaatttgattgttcaggtatcgtatacttaatacattctactgtaccaataggatgttcatcttctattaataaaaatcgtgatggatttaaattacgttctacgaacattaagtttctttcttcacaaaaatctccccatagttgctcgaacccaaaatgttcttcctttgtttgaacacgctggaacatatttaaccgcctttcccatcgtcgctctgtttttgataacgctttcactatctatcatataagaacaaatcttcgtatgcaactaaaaatatttatgacttattatattctgcaaaatgaattagattccaatttaatcgacttttatcccgcgctcacattccttttaataacacatttgtagcacttttcaaatctaaattacattatgtttctttccatacagcatataattcttcttaatctaaagaaatcctttatgaaaaaggatttcttttacttcttaatgctttttaaccatttttcaaaaatttgtatcatcccatgttttccagctaatttctcttccccttgtttcgtcttatatggatataactgcaagaaaacaccgcatccagactcaatttttttactatgcatatggcttcctggatatacacaaatgacttcataaattgaccttcgataatagactcgctttccatcctgttcttctacatactttatagaccagtacttatacatttgctcagttgctttcgtatttccgacgtgctgaaaaatattgtacattggactatacttcacttcaataataatagaagatttatatacgtatttcccatcttcttttacataacagtctaagcgaatatctggcttcttcgtatcctcaccattgtaaaaattactacctttacttaatgcaataagaggatgtgtttcaattaagtcattaaatgcaacatgcacctttatatcatctcgttctaaaactactgtcgttccatcttgtaatccatctacataaaaatgttcttgtatttgttcacggatagagtttctagcttcaaaaccaatttgctctaaaattgaaataacgataaaaaaagcgtaatattcatacactaaaaacgttggcttataaacaaataataacgatggagattgatccgtatattgcgggagtacttctaaatgatgtagtaattgttgatgtggtatcggtaaatcatgtaagttcatgttacttgtttcagtaacttccctccaaaacgaagaatgcattaacatttgaaagtattgtacattttcatgcacaatatgcgccaatattttatattcttgtattttcattgagctctttcgtaaatcggcttcttttagtaaatgtatatttttatatttttgcttctctctatcagttaccgatccattacgctcaattgtttgtataatcgtttttacggcttgaaactcttctgattttttctttttttctctttctaagatttcaattgtttgacgtaaaaaactttttgcttcaattaaataatgataaaattgcatcgctttatatttaagaaatgcattttccttactatttttttgttccataaacttacgattataatatttggcataaggttttcgttctgctactatagttccttttcttgttggccttcgctcttttccttcccatttatattcatttataaattttgagcttgattctattttcttaaagatttgctttatcattttcattttttggggtaactttctaagtaacactaaataagaagaatcctcaatatcgctaagtgcagagaaggtctttttatagtaacctctatccaaaatcaactcatttaaaattgacttcacatagtcttgaatcatttcaaattgatcatcaaaaaagtttttcggtacgatttgaaatgcgccataatacgttgtatcttctatacgcacttcaaaatggtataaaccacagcgccatggataaaagaattctgttttcccatgttcatatattaatactctttgttttttttcatttatttcatattgagcctcttttatatttttctgtccctcatatactttattccatataaaagtaatattcattggaatttcataattgtactgcaatcttattggttttaattcttgtactttataaatacattgaactaatgctgtagtagatgtacaaagacgatttaataaaatataatctcctttcccctcatttccaatgattaactttaatacaaaagggagcgtttcattcgtatcaacgatttttgtttcgtaacgcccttcattttgcatatccatacagctccagttctctacgtttttctcgtatatatgctaaagagtgttcaaatgtagatactctgtttgcaagtgcagattgcaaaagaggtactaaggtcgcccccctttttgcttcttcagaaagtaaaggcccaaccatcatttcggtccctctgattttcgtcaatacacgctgctttatttgtaaatcaaacccctcttctctactgatcatataggtatggttattttggaacggtatgttttgcaaataagtcgcaattgcatttgcacatcggaaagaaattcccttagacgcgtcatgtgatgacaatacgacatgcaacttatctaatagctctaattcttcttcagaaaacacttcaatcatcgctttatttctcatccaatttatccgaaattctcccgctgttactttcaaaggtggatgtaatacgactttcccctgttccatgtccatctcacaaaacggaattttctgtaacgttattaggttcgttcgatctaataatcgatcagagagctcttttgttgtttcatcaaaattcacagtacctacaaatataatattttctccaatttcaattgttgatggaattgaattctctatgtcctgtacaccctcatacaagtttaaaatacgattttttgtttcaagttcaagaacagatagaaacggagtaaaccaatgctcaatatgagacatgttcatttcatcaaaaacgattatatacagttgatttggattttctttcgccttcattaacgtcctaactaacttcgtttcactttcaataaaagtaccatttggatgaaggtaaccaagtaaatcatgtggttcttgatacgatggcgaaatcggaatccaaaccaactcttccccatactgtaaccctaatgcttctgcataagtttgcacaaaacgtgatttcccaatgcccggtataccaccaagaatcgttaacatatttgtttttacacttatatgaaaattataaatatccgtttcatccaaatataaccctttattatgcaccatactttgtacatactgtaaaaaagacgattcacgctcatcccattcccattcatctttttgtacttttatatcctctacttcaactagcttaccttcttcatgcattcgtttttttaattgctcatacacataatcacttacaaaatataattgatcttctaccgctatttctacatacttcggccagtcactgcagtttatatatttacattcacgtttctgttcaaaataggcgattgagctaattgatgactttagggatatgtttccgtaaagtcttccatcgtgccacaataattcgggaggctcaaagtctttcggaaattttggcataagaaatgataaataaccgttgctaagttttcgttctaaagattctctttttttattatttgtaactttaggtgccggaatcattttatagctgcttgctatttctttcggttcttctgtacatattaactccacgtatacatttcctctttcataataaagacgaaacattactagttgcttttctaatttcctcttctttaattccgaaaagattttttcattctttttattgctacataacccttcaaatacatatggttcatttgtaaattgttcctgtaaagtgaatggtattggcgataagcattgtacaaagaaattctctccactcttctctttctcagcttttgtaaatttccctaaaaatctcatatagtacattcgttttataaaacttggctgaagagctttatgtaatttcaccttagtcaccttcttttttcatactattcttagtgtatgaaagaaacgaaaaactagaaataaaaaacctgacgttatccgccaggttcaaaataaaaacttatattaatgagaaggaaatgcttttttctcctgtaaaattgcattatgagcaattttcattttcgcaagtacgtaacgtaatcgatcttcagcgttttcatctttacttatttgtaattccgccaaattttcaacagaacttgctaaattttcaatgactcctcttagttcaggatgatgattaaaaaaagattcttgcactaatactttccttaactcactagctaaatcaattattctagacaactgttctttttcttccattctcatccctcctgaatatcttatgtagtaaatattctctaaacaaagaaaaaagccctttaaatgaaaaggactttttacatttttatatttccagttaataacatatatattgatgtgatagccgcaacaataattgcccacatcacatacttctctacacctacaaagcaacggttcccttgttcttttcttgcaaatgtgtaaacaataattccaattccatacacaattgaaacgagtagtaaattctttaaaccagctgcataaagaagccatacagagtaaatagaagcaattaaagctaacgctccgttttttaatttagcgtcttttagctcgtttgtaatgactaatttaaattggaataacgctgataataaatatggtaataaaattgatgttgaggcaatgaaatacataatttgatatgttgattccgaaaacaaaacgatgataaatatagtttgggcaacaccatttgaaatccataatgccatgtgcggtgtttgctttttatttgttttcgtaaagactttcggaaatacgccatcttttcctgccacatgagaaatttcagaaacaagtaaaaaccaaccaattaatgtaccgacaagtgaagcaactaatccgatgttaatcgcaactgcaccccatggaccaacaacgtgctctaatacatgccccattgaaggggtttctaacacagaaagttcgcctcttgtcatagctcccattgacaggacagaaattaaaatataaatggacattactaaaataagtcccaatactgttgcctttccaacatctcgactattcttcgctcttccagataatacaactgctccttcaactccaatgaaaacccaaagtgttacaagcattgtatttttcacttgaccaagtatagcggaaagtgagatcgttccttccccccaaaaatcatgtgtaaatgtgtcccagcgaaaggctgttaccattacaacaataaataaaacgattggaactaacttccctattgttgcgatcacattcataatagaagcttcacgaattccaaataaaattaaaaaatgaagtgtccataataaaagtgatgccccaacgatagacgcaacattatttcctcctttgaaaattggaaagaaataacctaatgtactaaacagtaacataattgttgcgacattacctaagattcctgctagccaatatccccaagcactattaaatccaatatattcaccgaaaccagcacgtgcataactataaattccaccttcaagttccggtttttgtcttgctaacgtttgatatacgagcgcaagtggaatcattcccatcgctgtaatacaccagccaattattattgcaccactgtttgctcctactgctaaatcatgcggtaaactaaaaacaccgccaccaaccattgttccaactactaatgcgattaatggaaaaaatcctaacttcttttctatttgtaccaccccatctgtcattctaggtgttatgttcgttcaactattaaagtcacctttttctctaatagacgtttctcttatattttttcaggaaaacattacttattctaaaagaaaatgagcaaaaatggaatacttttttgaaaaaatgtataagtatgcacaaaaaaaccgctcattttgtaatgaacggccatttcaaacatataaatttgtatatttcttgtaaatttaacgaagtaacttctctttttgtaaaaattgttttgcgacttcttcactacttttaccatttacgttaacttcataattcatttttcgcatttcttcatctgtaatctttccagataatttatttaataccttttcaagttcaggatatttctgtaacgtttcttttcttaataatggtgctccttgataaggtgggaataaccctttatcatcttttagcactttcagtccgtattgctccaattcactatctgttgaatatgcatcaattacgttaacatctccagattcaattgcgctataacgcagcttcggctccatcgttttaacattcgagaacttatagttatataatttttgcattcctttataaccatcttcacgatcagcaaattccaatgtaaatcctactttggcttcctgcgcaacattccctaaatcagaaattgtatttatattcttttgatctgctatttttttcggcatagctagtgcatatgtattgttatactccattggcttcaacataatcatattatatttcttttccattccaatgcgagcctgctcatatacttcatcacgatttgtactctttggttcttctttcacgaaagtagataaagctgttcctgaaaattctgggtatatatctacttctcctgatttcaacgcttcaaatacaaatgctgttttcccaagacctggttttaattgtacgtgtaaatctgtatcttgttcaataagctgcttatacatttgaattaaaatttcaggttctgatccaagtttgcccgcaataacaatatctttcttttctgtactccaaagaaatggagaagcaatcattatacaaacaatacatatcgtcaatataacacgcttagaagagcgtttcggtcgttcaagtatgcgaagtactatatcaaagaataaagcgagtaacgcggctggtacggcccctaaaatgataagcgcatgatcatttcgatctatacctaatagtataagcttaccgagcccacctgcaccaatgagagctgctaatgtagccgttccaacaattaataccatcgctgtacgaataccagccataatgataggcaatgcaagaggaagttctaccttccacaatcttctccaactattcatccccatagctttcgcggcttctattaaagattcatctaattcccttattcctgtatatgtatttcgtaaaataggtaatagtgcatacacaactaatgcgataatcgctggaagttttccgattcctactaatggaattaatagtccgagtaatgcaagtgatggcactgtctgcattactgcagaagttcctattataaattcagccattcgttcttttcttgttaataagatgccaagtggcaccgctataattactgcaaaaaataatgaaataagcgatatttgtaaatgctcacttaatgcagttagtaattctatttttcgttcttggaacgtttgtataaaattagtcactgtttagcctctttccttcatttgttcaacaatgtaattgacaatgtgacgacttgttaacgctccaatatattgaccgtttttttcaactggaacgacctcctcatcacgcacacgaactaacgcttcttgtaaagaagaatgtaatgatagcgcctgcccttctaattgcacactttgatcaagtggcaatacatctgctatacttttcccctcataccaagttcgcccacgatttccaatgaattcctctacaaattcatttttcggattatgtataattccttctggtgtatctagttgaacaacttttccttctttcataatacaaatgcgatctccaagtgataatgcttcttgcatatcatgtgttacgaatacgattgttttttgaatctttttttgcaactgtacaatatccttctgaagctgttccctacttaatggatctaacgcactaaatggttcatccataagaatgattttcgggtttgcagctaatgctcgcacgacaccgacacgttgtttttgtcctcctgacaattcatcaggcatacgatttcgataaatatccggatctaatccaaccatatgtaacaagtcatcgacgcgtgctttaatttcttttttgctccattgcctcatttcaggaacaactgcaatattttcagcaattgtcatatgaggaaacaaagcaatctgttgcaacacgtatcctatatcccaacgtaattcgtttatattatattgttgaatatcttttccatcgattaaaatcgatccttcagtcgtttcgattaaacgattaatcatcttcattgtcgttgttttcccgcaaccactcggaccgatgagaacaaaaaattctccctttttaatttctaaatgcaatgaatccactgctttcgtgccatcttcatacgattttgacacatgattaaattgaatcacaaatacaactcctttactgttgtttcctttattttgatggaatatggcattcatttcaaatgatacgcttttaaattaaaaaagagctcacatttgagctctaacggtcgaacaatattgttttcattatagcagcatattcgcgaacatacatttttctcttagaacgaattggtgtttcagcagctagtgcctccatcttcatgcctaaacgctttgcaattattttcgttcgatataaatgatacgtattacttacaactaccgcatgtttcacattatataaatccatactaaactttaagttttcatacgtatttgtagattgatcttctattaaaatacgactctcatctataccgtgtaccattaaatagtttctcatgctgtgagcttccggtatatcttcatcttctccttgaccacctgaaacaattactttcgcttcaggatgggaaaataaatactccaacgctacatccaaacgattttgaagagataaagacggtctatctccaaataactttgcacccagtataagaacgtacggagagtgatagctcaacttttcacgagcaactttgttcattctaaacgtcatataaatgatatatagtggcggtaataataaaatgataagaaagatccatttgttcataaataagtttgcactccctttctttttattatacagaaaaagaaagggcggcagaagtgttttttaaacgattgatttattagaaacattcgccgctactttacgttgtgatagtacataataaatagcgattcctaatgagaagatcaatatgcagcttaatacgtaaaatggaagcattactccggctttagatacacccgctgtaaacagcattaataatacaattcgtattccagtaccaattaggcgaaataagctgtctacacgtcccattacttcgtttggaatttcctccatcatcaatacatttctcgccactcttgtacccgcatttccaactgcttgaaaaattgcaagtccatataagaaaattacggaaggttcaataatcattgcggtaattgaaattacataaatggacatcgtcataacgattgaaacttctgtttttacatatttcattatgagtggaatacagattcctgcaacaaccgctccgacaccgtacatcatcccctctattgcgtatacagaggcattggctttaagtatatccgaaatataaactggtattaaataatttgccatcataacacctataaacggcatataagtggccagtaagaaccaaaagagcttaggacgttttttcataaagtgaattccttcaaacaattgcttcttaaatgttatttttcttttcacttcttttttctttacgtatggtatacataagaaaagaaaaaatgctccagcaaaagttaacatgtctactaacaaaatccacttcaaagatacaatttcaattaagaagctcgcggccgctccagaaataacttgtgttaactgtccttgtatttccatcgttccacttaaacttttataatgttctgcttgaaatatctcttggttgaacgcaaatattgtaggataaaataataaatagtagaatgatccggctatataaataagaatatagtgaatagaatgataaggttgcccagcaaatccccatataaccattattccgattacggctattccgattccttcgttacatagcaataaagattttcttgaaaaacgatcaatactttgcccaatgaatggtgttaataaaaacataatgagggttgcaatgatagaaacataaccaaatgttgtctctcctccactctctttaattaacagccaaggaatcgttatcataacaatcccggaaccaatagcagatagactattggctcctagaatgtaatacaagcgagaatcatgataaagtgaggacatatcattccactcctagttgttttttcacctctttatatacgctcatatatgctttcaattctttaactacatcatgaattaatggttttgcatcttccccaagttcaccatcttgcacatgtaatccatcaagcacaacttgttttggaattgcatttgcataaacacctctagcgaccgttcgcatgctgtttaatgcatttattccacctttaccgccaccagcaaccgctaacaacgcaactggtttatgaataaattcactactacttaagtaatctaaagagtttttcagcgcaccgctcatcgcattatgatattctggtgtacataatacaaccccatccgcagctttcactaacgtttttaatttttttactgcctctaaatcacgttgcgactcttctccattgtataaaggtaactcctcaattgctaaatcatataattccccttcaaattgatccgcaatatattttgccaccacgcgagttctaccaaattttcttggtgtaccgttaataacgactagtttcatgattatttctcccctttgttttcaagttctacttatatattatcagaaatttctatacaaaacacaatataaagagttaacttgtttcataaaatagtatgataaacaaaaaagaactcatactttcgtatgagtttcgtacaattactttgattcatctctcatgctcaatgtacctaaactttcatttgcttcaaaatgattatatgctttttccgctaatcttttccgttcttctggtaattctatatatttcattacgttttcaattattttttcgtacggagtaaatacaattcctggccactctacctcatcttctggattactattttcggaaataataaatttcttattcgcaactgcataagacacgcgaggtgtttcaagaattcctgataagtaaaaatgaatatttaatataattttagctctagcaatcaattcatttctaacaattccccacgcattatttttaaaaactatatttaaattcggggcaatcgcttttagatgatcaaaaatagcttgtcgcctcggattaagagcacctataaacagaatatcaatatcttcaataatctcatcttcaaacgcatctttttttatttccaaagttggagcatagttcatttctacatgttttatttcttttcctacccctttttgttgaagccattctatattttgtttactataatcccaaatcactctatcttttaataatattaaataaaggggatgcgcatatggacttccttcgtatagctgttctaaattataaataattgcatctttcggaagaagattcgggttatatgcgtatgtatgtgctccaaaaacaactgtattctttgcattttccagtattgtttctgatataattactgtatttccctcctgctccaaccgccactttaaagctcgcgcaacatctatgaaactaccgtatgtctttgggcatataaaaagacaataatcatattctttattcaaataaacttccattaatcttaaattatttttatataaatctacatctggatgtttaagtaccaactcatttgcatgttttcttgctactttatataatccagcataataagcagcgatgcatcttcttaattcgattctttcccggtcctcatctaatacatccatatttaaaagaagatttgcgatacaatacgcttttaaatgatcacgatcataataatagtctagtagtggcatcaattcttcatacgtatttccatgcaccgattctcctagttcaatcgcccatctcattaattccatgattactccactactcctttaaccgaaaatgtatttaataaaatttcgcattattctctactatatttgctatatgaaatggaatcttttcttttatcgattccaaatacttttgcgacaccgcccctaaatgttttttatgaggtatatagaaagcactaatagaaatttcatagtcaaataagtaatcatacacatgataatctacaaatagtagatcatcctttggaaaaggaatttccttcccttgcagagcatacatcaaagcaatattgttttgagatcgtaatcgatacaaccttgcaagttggtataatggttcagcccgggttggtctatattcccaagctttttgaaaataaaaaacagctaatgctaaatattgctcttcttgccctttaacagtttctttttcatcagcatctgtcacttcattttgtttatttgctgaacgatttgctaactgctcataacaaaatcctattcgcaataacgaatagaatacctcttcaacccatcctcctgcttccactcgttttttataccatttaattgaattctcaaattgacttaaatgaaaataagtctgagctaaataaaataaatatcttatatgcaaatctggcgttgtttctgggtcgtttattccttgtaacaacaacctctcatctctttcaaatttatcagctttgctcccgccatctccgggatcattcacgacaagagtctctaaccgagctaccctcgtattgtaattcgctccaacttttgaacgatctatatcccaatactcatgagtaacaccgacagatttccatggtaaagaagctttcaaaagacgtgtaagccaatatttaatatgaacatcatattgtaatgtaagataatgatcttccgttaagctcgttttatcgaaattcggatcaacctctaaaatcatatccgcatctaatattaataaataatctgcttctgggtatgttttttgcgctaacgaaacagctaagcttctgttataaccaaagtttttaaacggctcatgatgaaccgtcccaggtatctcattttccttacaccaattttcaataatttcaggcgtattatccgtcgatccagtatcacaaatagaaacaaagtctacaattgattttgttgcatttaaacatctttccataattctagactcatttttgacgatcatacaaagacataactttttttctttctttacagacttcacttgctcatttcccatttaaccacctcatattttattaacacgctcttctcatatgtaacaacatttcttagctatactgatgacataagcacccttttactatttatgaaaacttcattttatttattcttacttttatgttgagatatatttcatgcagcgctttatatttgatacaatcaatacaaaaaaacataatgcgggaatccgtacatttcaaagtctaagaggaggttatattttgttggattacatttggctagatgacaaatcaccaattttagaacaactaccaagcacctttaaatctgcagctatattgctacacccttttgtccaaatgcctttaggatgggaaaagtctgtgagaaaaagaccatatgagcacatctatcctagcgctgaagaaatcattcataatgggaaatccgtttcttggaaggaaatgatgtcttatagtggattacattcatacgcagaattagcaatggccctgttgacttccattggtgcttatacagaagaatataaaagagaggatttagccgaaaagctatattcaaacttaaaaaaagatctttattatccaacagaagattatacgtctatatttttattacataaattacttaaactcctcggttctaaaggtgcaaaaaatttatatttctctgaaccaattcttgatacaaacggattattagaggtaaataatactactccattagatatttgggacattagcaataatgagttaattattactggcgaagataatgagtatgcgtttatgagtatattcgattcctttacaaccttattattagctaaagaagaaaatatagaatatattgttcattcaatgaacgttgaagctgtcatttgtgacaaaaaaacgatgattgattggtatttttaaattagtaatttcttaaactataaaaaagaaacttgcgcttatgcacaagtttcttttcaaaaacatccttattttttcacaacttcatgtccaccgaactgattacgtagtgctgaaactacttttccatggaatgtatcatcttcctgagaacgatagcgcataaataatgacatagcgattactggtgctgcagcttgaagttcaagtgcagtttcaacagtccattttccttctcctgaagagttcattacacctttaatgccatctagtttcggatcttctgcaaatgctttttcagttaagtccattaaccaaccacggataactgatccattcgcccatacttttgcaacatcttcataattgaaatcaaagtcactcttatctagtacttcaaatccttcagcgattgcttgcatcatgccgtactcaataccgttatgaaccatttttaagaaatgaccactaccaacacggccagcataagaatagccattttctactgctaaatctttaaataaaggttctaattggtcgtaaatttctttttctccaccaaccattaagcaagcaccgtatctagctccttctacaccgcctgatgtaccgatatctacataatgtaatccgaagctttttgcttcttcagcacggcgtaacgtatctttatagaatgaatttccgccttcaataacgatatcaccttcatctaataacggataaacatcttttagtactgactctacaacttctcctgcaggcaccattacccaaattgtacgaggagcttctagttcagcgatcatttcttttaatgtatgacgtgcagtaattcctagttttcctgccttttcaacaagctctttatttacatcgtatacaactacttcatgcttgtcttcatataagtgttcagctaatgggaatcccatttttcctaatccaattaaacctagtttcatattaatcaatctcctattctatacaaatatatttaatatcgaaattagcccaagtgctactacagataatatagtctccattgcagtccatgttaataatgtttctttcacagtcattccgaaatactctttaatcatccaaaatcctgaatcattcacgtgtgataaaattaatgaccctgcaccagttgcaagtgctaataattcaacatttacacctggtgtgcttgctgcaatcggcgcaacaataccagctgctgtcatcatagaaacagttgccgatccagttgcaattcgaataagtgccgcaattccccaccctaataatatcggtgaaatatgtgattctttcgccatatctgcaattgtcgttccaattccagaatctaataatactttattaaatgcaccgcctgcaccaatcactaacaatatgtttgcaataggtccaaggcaatcatttgtaaattgtaacactttatcttttgagaaaccttttgcatatccaagactaaagaaagagtaaatggttgcaattaataaagccacaatcggatctccaataaagtgtaatacttgtgctagttgactcgttttatttaatgcaacttctgctattgatgcaccaagcataagaaatactggaagtaaaattgtaaacaatgtattcccaaagcttggaagctcttttttattatctttttcaataaattgctccgctatatctaatggtacttccttatgtatacgagcaccaatccatttcccgtaaagtggacctgaaataattgcagttggaagtccgacaattaatgcatataaaattgtcttccctacatctgctttaaaaataccaactgccgccattgccgctggatgcggcggcactagtccgtgcacaacggatagtcctgctactagcgggataccgattgtaataagtgatacccctgtttctaatgcaattgtaaatactaacggaattaatagtacaaatccaacttggaaaaataccggaatccctactaaaaatgcaacgaacatcatcgcccagtgaactcgtttcttcccaaaacgattaattaatgtgttagcgatacgttcagcaccaccagattcggccatcatttttccaagcatcgttcctagtgctaaaactattgctaaaaatcctaacgtattaccaagtcctagtttaatagaatcaataattcctggatcttttggtgaagttccaattaaaggcattcccattgctaatcctacaccaattgctgttaaaattaatgcgacaaatggatgccattttactaccgtaataagtaaaagtagtatgacaactgccgctagtacgatcccaactaccatttctcccaatccccctattttttacgttggaaagcagctatacaatcaaattcttctttcaagcgattgtaaagtcgttcatacatataaaacatttctaaatatatagccgtattttctttattcggtacatgatgatggacaatatcaatccaatcctttacctcttcaagagaatcaatttttcctacagcatacaaagcaactgccgctgccccaagcgcagatgcttcatgactttcaggtacaagcaattcttttcccatcatatcggacaacatttgtctccaaaatgcagattttgcaaaccctcctgaaactcgtatttcagtaagtggccctgtacaatccctgattgcgagtgctactgaatatacactcatacaaacaccttccatcactgcacgtataaaatgttctcgcttatgttgaagattgattccaaagaatgtaccacgagcatttgcattccagtaaggtgcgcgttctccagataagaaaggtaagaacaatagcccatccgctccagctggtacgctttctgcatatttaattaataaatcataaggatcaatgccgagctttcttgctacttcttgctctggactaccaaattcatcacgtaaccatctcagtaatattccgccgttattcgttggaccaccgattacccagtgctcatctgttaatgcgtaacaaaacgttctccctttctcatctgtatttatatttgatgagattgttcgaaccgcaccactcgttccaatcgtaattgcagccgcacccggtgatatcgcaccaactcctacatttgcaagaaccccatcacttgctccgatgacaattggtgtttctgcacttatccccatcttctgtgctaattctggcttcatacctgataaaatatatgtagttggtacaggggttgataatttttctggtgacatatgtaacatagttaaaacatctttatcccagtttaatgtttctaaattaaataaccccgtagcagaagcaatcgaataatcaactacgtagcgtgaaaataattggtaaatcacatactctttaatggaaatgaatttataggcacttgtatataactctggttcctcttctttcatccataacaatttagaaagtggtgacatcggatgaatcggtgtacctgtacgtctataaatttcatgcccattcatttgttgtaataatttttctgattgcttcgtacttcgattatctgcccaaatgatagaacgcgttaatggcgcaccattttcatctactgcaattaatgcgtgcatagctgtactaataccgattgaagaaatatcttctggtaatacattacctttttcaatggcaacgcttacacttttgtatacagcggcacatattacatcaggatcttgctcagcccatcctacattcggttgaataattgggtaatcgattgcatgtgatgcaatgacttttcctttttctgtgaacacaaccgtttttgtacttgtggtaccgatatcaatcccgattactctcccccttgtttccatgcgaatcttcccttcatttctagcaaaatacgatttagtaaaccgtttacatgaattagtatataaaatattttttcatttatcaagttgtaaaaagaaattttttttcatatcaaaaaataaatcccctcattccatttcacttatatactacatttagcttttccatggggtaaaattacgttatattcgttacgcaatacactctttcctctcattaacaacacatacatagtcctccatacgttctacttatttgcttgaagaaagagttgaaaagcaatattcatttttagcggtcacgtaacatcaccatccagccaagaaaagtaactaaccgcagaatgagaattctgtgcattttgctcttatttattgttttaggttcactagtcttttatcttgataaacatagagcgtggcccccctactatcacttttttaccttgtaaatatatcttgcatactataaaaccgaaaagtatttttatttttcagaaaaataaaaacaataacacgaaatttattgtataatgttgtaaaaagatgtcggagggatttaatgttaaataaaatatctcaattcacaattaagctttcgtcaattcttttatcactcttactattattaaatttaccttatttatttatcactcaacaaggatttacctttcaaccaatttatttttttaatcagaccgttactatgttaaaacaggtttttccccctgaatcattagtgattataggatcagacccgaagcttggccatttcaaaaaaacaccattatttccaactgttttagaaccttacctatattcatttactatattatttttagccttttttcttgctctctttttatcatctagcatggcatttttttattttttagcaaaagattatataaaaaaatggataaaccgaattgtgttcatattagaagctgtccctgatatgatgatgatgatttgtttgcaaatatttttcatatgggtacttcagaaatttggggaatctcctgtcactattatttcttttaatgaaaatcgagcttatttactccctattttatcattagctgtcttacctacattacaaatgtttcggatgatggtgttatacataaaagaagagcaaggaaaacattacgtagaggttgcatatggaaaaggcctttcatcaagttatatactatgcattcatttattcaaaaatatatctatccacttcttccaccatttaaaaacgatttttgttttcttactttctaatttattcattttagaatttgtttttaatatggaaggcattattcaatttttatttaataaggcgtttgtttcacctccagctgcatttatcacacttgttatgattgttttaccattttacgccattttccaaatagtctcattcatgatgaatagatggaaaaagcaattgaaaggagtatcattatgaaatctatttggaaatcaaaacgctttttaatcggctttacttatctattcatacttatttcagctagttttatttatagttggttctttaaagataacatcccaaaacctcctcagttactttacaatgacaataacgaattacttggaaaggccccctttccgccatcgttaattccaccttttggatctgatcgttttggagagtctgttttcttacaaattgtagaaggagcaaaattcactattttattggccatggcaattagcttctttcgaattttatgcggaacatgtataggaatcctcttaagtttatttgctccaaaactcaagagatttttccagtcatgctcagaagttttttattatattccaactctatttatcgcattcatactcatcacgcccgttaatattataatcacatcaaatgctgatggggtagatccaaatatttcatttacgttttatcaagtactcgtacttattttcgtcgctctgcctacactttctttatacatatcctcagaagttgatgaatttatgaaacaagattacatcttaagttcacaattactgggggctagtcgttttcatattataaaaaaacacttacgagtcttattacttgaccgcttatttgtattatttatggaacatatcgtccaaacactcatactcgttatccatttagcgttgcttaacattgtaattggcggcatacaaatgcgtgaactctatgacggagtgctcaaacctgtttctctatctaatgattgggcaggtcttattggattaaatcgtaatgaaatgaatctttcatggtggattattttttatactctcgcttcattctttattacgattctatttattaagcttatgaccatcgggattcaagatgcactgaaagcaagagattcgcaaattgtagcaattcaaaacgttccagatcataaaaaatttgttaaacataaagattccttttcgtttgcaaataaagtaaacctttaatcatttctcattaatcaagtattaattggcatcgatattagtagaaaataaagaagatgatccctattaaatacagggatcatcttcttatactgtctaacttttttacatgtcctttgctagactcatgctttttatatttaaagtgaattatttgcaatcacaattatgttttttaaaatcaattaccatacgcccttgaattctaccttgttccatttcttcgaatacattttgtactttatctagagaacaagtttgaacaaccggcactacttttccttctgccccgaacataaacgcctcttccaaatctttacgagtaccaactagagaaccaactacttcaattccatccagtacaagtcgtgggatgtttaagtccattgtttctactggtagccctactgcaactactttaccgcaagcacgtactgcatcaactgctgagttaaaggctactttagagactgctgttactaccgcagcataagcgccaccaaactcctcttgcacaattttatcagcaggaccttgagaaattggattgatagtcatatcagcaccaacttctttcgctaaggctaatttgtcgtcattaatatctactgcgattacctttgcaccaaatacatttttagcatattggatagctaagttacctaatccaccgcagccatagattacaataggttgactaggtttaatatctgatactttaatagctttatatgtagttacaccagcacaagtaattgatgatgcttgagcaggatctaatccttctggtacttttaccgcataatcagctgtaacgatacattgttcagccataccaccatccactgaataaccagcgtttttaacttcacggcaaaatgtttctctaccagttacgcaatattcacaacgtccacaagattggaacatccatgcaatacttacacggtcacctatctttagtgaagtaacatcatcagctattttcgtaacaatacctacaccctcatgaccaagaatacggccatcagtgttaccaaaatcatgattcgcaacgtgtaaatcagtgtggcaaactccacaatactctacatctactaacgcttcacctgagtgtaacggacgtaattctttgtcaatcacttcgatgtttgctttgctgtttttattaaccactactgctttcatatgtgatctcccctttagtgttttagcattttaatgagtttatctcacaactactttcttcactactttggctagttattctaccaaatttaagtgttcaatcatcattacatcttcatcataacatgacacttcataaacaacttgtgaaattatgaacaatatttgaattattacacaaatcggtctttattttaaatttttaaaaatgagagtttatcattgactataagtaagtcacatatttctaaaacaaaataaattaacaaacttctcaccgataaaaaagctcttcactcaatattttctacatgtaaacacttagtttcacagtaatatcctttgccaccaacataaactttttctattttatttttgctattggttgctaatttaactaatatttcagaaggcgagtgtaaagaataaccttgttcaaatacatagacttcttttttcaagtagtcctgttcataaaggtagcaagctaatgcaccgttcgaagttccagtcgctgcttcttcattgatgtcgtatagcggagcaaaatttctgcatataattcgattgtcattaaaagtatatagatgcatcccgacaacattataatacttgctgatttctttaattttttcaaaattaggttgcagtgcatgtaattgtgtttcgctttttataggaattaaaatatcttttaagcccgtggagacaatttgaattgggtatttattttctatatctttactatcaaaacagtcgatgaactcgtttggagatacaacatcatagaatatcggtttattttgttccatgaatatgatgtcatcttttatagtaatagtaagaacaccgctgttcgtttcaatcgtatagcgattcctgaaaagtttatttaaatgcatcagtatcgcgaaagagccaattgtggcatgaccacataaatcaacttcttcttttggtgtaaaatactcaaatttataatcagcaatttcagattctgatataaatgcggtttccgcatagcccagttgtttggctatttccattttttgagtagtggtcaatgtattctcaataaataccactcctgctttatttccgcctttatgatccttgctaaatgcacttgcaacataaacagatattttcataagacaccttcctcacttatagtaaattatagtatagaaagcactacatataaattccattggataaattatccctaaaataagaaacaaactatttttagcatttgaactctccaaaaatagtttgtctacagtctgaaagctcttcatttgaagagctttttttatattcgcttcatcgaaatcgtttcacgtatactttgtaaattttttagagtttcctcttgtcgctgcaacgacaaccctacatacaaagtatctaataagcttaactgtgctaatcgtgatgaacttgcttctgtgcggaattcagtctcacgtgttgatgtatataacgttatatcagcaagttgacttaatgctgatttcttatagctcgtaatcgcaataattttggctcctcttgctttcgctacttctaacgcttcaagtaatcctttattgctaccagaatgagaaataccaataacaactgaattttccgagagtaaacctgcccccataatttgaaaatgcgaatcagtatgagcgatacaagaaatacccgttctcataaacttatgatacgcatccattgcaataataccagagccaccatttccataaaactcaattcgacttgcttcttgtaaggctcgtacagcctgctcaagtgccgtttcattaagcaaatgtaaagtatcttgcagtcctgtaatatgcgaatgaaaaacttttttagcaacagttaccatactatcttctgctgatacctcttcatggatattttgcatcggtgtatgtacaatttcacgagctaatgtaatctttaaatcttgaaaaccttgcaaaccaaggtttttacataagcggaatatcgtagcttcggaactattcgtaacttcagctaattctgtaatagatttatgtacaacatcttgtggatgtttcaaaatatgttcggcaatacttcgcaatttcggtgataaaccatttaacgaagcctgaatctttccaatcccacttcttgtaccaggcatagcatatcctccccttccatcgtagctttatcctgtaaaaaccgattagttgaactaatcatcagtggggatggtcctccactgattagagtttcactttattgtacctaattatcgaaagaagaaaaacctatattagggattactataatttttaattgctcctatgtattctgtcatacgatataacagaattattcatgcttatgaataattctctccatgtttcactgcgtataatgcggcttgcgtacgatcatccacttccaatttagctaaaacgtttgaaacgtgtgttttcacagtttgttctgtaatatgaagttctgctgcaatctccttgttgcttcttcctttcgcaatttcgcgaagtacctcttgctctcttttcgttaacattgaaaaaggattttctacttccttctttactgcagaacgccccattaatgcaggtgttactttcgggtgaaaattcgcatttccttgatgtactgcaataatagaagcgacaagttgctcaggttgtacttcttttaattgataaccatctgctccagcttcaagtgctggtataacataatcttgctctgaaaaactacttaatataagtacctttattgtctcatcatattgctttagacgttttgttgcctcaattccatccattttcggcatcgatacatccattagtacgacatctggtctttctttttgcacgaaatgtaatgcctcttcgccattttccgcttccccaataatttcaaattcttctctcgttttcaaaaagaatacaagtcctcttcgaacgatatgatgatcctcaactagtagcagtttaatcttcaaccttattctccccttcaaatcggcaattgaatttctatttttgtaccctttttcagctctgttataatttgaaacgatcccttcattaactgaatacgttcctccatacttttcaggccaagtgctgattcccttacctgttcttgtataaatcctattccattgtcttctatgtaaaaatgtaactggttattttctattttcaaaagaatatgtaccttttcacacgaagcatgctttttacaattatgtagcgcctcttggctaatacgccataaaacttcttctatttcatcccccattgaaaccatcccatcaattcgaacttccacttgaactcctaataacttcccgtaattttgaattgcttctgctaatcctttctccaatccttcaggtcttaattgccaaattaatagcgtcatctcttgtaatgcttcttgtgataattccccaatataacttaacatctcttgcaattctctatcttgcgtcatattcagagtacctttcgctgttagcataatagaaaataacaattgttttactgaatcatgtaaatcacgtgcaagtcgatttctttccgctaccactacatatttacgttctttctcaactaattgaatacgttgtattgtcgttccaatttgaaatgcaattgattctaataatgctaactcttcctcagaaaaatgagtcttatgaggtgcagccacatttagtagaccaaatttttctgatccagacctaagcggaattgtcgcatgatgtgtaacatcttctgtctctccccaattacattcaattgcatcttctattcgcttacattcaataatattagtcgctttttccaatctcccatttacaaaacgttctacacaccaacagtttccttcacacatcggcttcttcttttgccacgtaagagcctctggtaaattttcgtctacaagcatactgtgctttccactttcatcaataaagaatatccaccctgtttgtaaattcattacttgtaacaatgtatgcaacactttttctaacatatcctgtaagtttgttgcttcatttaataattcagcaatttcttttaatgcttctaaacgacgcatctctttttcttcaaagttcattctcatcaccaactacaattataacattaagaaatttctaaattctataaataaaaaaagaaccgaattccttcagcctttctttatatcaatcattttattattgttattctatccaatgttggaagcagaatttttgttaacaaacgattctactttagctgtccgataaagattgtccaccatggatatgctgtaaaccttcagtagtaacaaccatattcgctgctggcatttgcacttgatttttatggaacatagacattaattcaaatcttacttgtctagaagtttcaaaataatcttctggctttattaaacctgtaatacaaaattcatagccaacatatttcaagttaggatttaagtctgtaacaccgacgtatttaaatggttcaacagcctcatcctctactctataaagagtttgattcaatttttcattgcatataacacatacttcttctaacaattccttcactcttgttggatcttcctgataacttaccgtgatgcgttcaattacacgcatccatcctttattaaaattttgtatcgttctaatctctccgtgcgggatggtaagtagttttcctgaccattcacgaatttgcataaaacgaatactaatctcttcaatagttcctgaatttgttccgttaaaagttacaaaatcaccaacccgaaactctttgtccgctaatcttgcaaagcctaatataacatcttttagcatctgttgtgcagcaaaaccgatgacaactccagctatccctgcacctgcaataatactttttatatctacaaattggctaattaaatatatgataagactgatgataatgatatatctaaaaatagatcgaattacactttgaatcgtttgctctatctcttcatcaaaaaagctcgatttcctaaaaaaccaatcaataatgcggtttattacaaatgaaataatgattagaacgaaagcaaatagtaaaaatcttaaaagtaaaaactctcttacataattaaaaaattcttccgtatacgttaataagctcatttaaccacttccttactaattaaaaaattcataatcgcctaagtttgttccagaaaaatctattatcctaatctaaaatgccgctacccttactatgtattttgactctattactaattcactttaaacagtatgtctagctgttctttttcctttccctttaaatataccctttttaataacctaagggggagcaaatcgtgaaatttttttatacgttaaaactttattcatctcattacgatttcaactcatttattcattaactacgtaaaaaaagagctgaatttatcagctcttttattcgatattaattgttgtcttactacttttttcttctttcaattttggcaattcaattgtcagtacgccatctttataatttgctctaacattttcttcctcaacttgtttaaaactaaagcgtcgagttacagaacctatagaacgttctttacgaatatatgtgccattctcatttttttcttctacttcattatgattagttgcttgaatcgttaatacatcttgttcaaaatcaacttgaatgttttctttttgaaaacctggtaaatctgctttcacagtatatttatcagattgctcatgaacatctactttaaaagtatccatgttcagtggcttcaagaaagcatctgtcatcccttctaataaagaaggcccaaaatcaaaaataccattttgacgttttgttatctctggaaataaattacgcatattttttcctccttattatttatgaatgaaagattatctctttctgcctttattataacatttggtcaaaaaaggtcaaagtttttgtttgaccttttttgatgtatattttaccaaataaaacacatgagatatttgacacctcttacatttataaagaggaatatatttatataataacgaatagtttatatgctcttatttttccttaatgaggttacctacaatggggtatatcgaagaaattagagaagttgtcggatcaagaccactcaatttattaggcgttgcggtagctgttttcaatgaacaaggacaaataaaagagaccttttttaaaggcctcttttttcacttcacttctgcatgtaggcatgacttaaaatgtccaagtgcatattcatgcccttgtgcattaaaagatgcaaccgccttttcataaacaacaattttaaaccctttattataagcatctactgctgtatgaagaacacaaatatcagtacaaacacctacaagatgaacttctgctattcctctttctcttaacttcatctctaagtctgttcctgcaaatgcactataccgtgttttatccatgtaatatacattctctgcatttttatatgtttcgtacacatcttgtaattcaccaaacaaatctcttccacttgtaccagctatattatgaggcgggaataactttgattctggatgatatacatcattttcttcatgtttatcaatagcaaagacaacgtaatctccattttcaatatattgcttcgttatatgtacaatttccttctcaatttcctgtcctggtttcccgcatgttaaagcgcctttctcagctacaaaatcatatgtataatcaatatttataagagctcgtttcattactatctctccttctcctgtttcacagtaaacaatagaaaatttgttattacgacatcgtatgtactattcgacatttcaaatgaaatacctacatttttcttgcaaaactcaccttaatccgagtttatcataaagtgaaactttaatcattggagagtttgttcatctccaatgattatcagccctcatcaatcgtgcatttacaggcagttgatctcccacctaatctcctcacctataccgagttttaaggtaaggtcttactgcccgttagtgcgggatataatagataaacaatggtaaaataaatagctcctattaataagtcatgaatttgataattgagcgtagcttgaatcatctcttgtatcgtaaaccaaaatactgccatcatcatactaatcaagacgatacgaatacaccgattcacatcttcaacctctttctctgtcatagtagtaacaagtgattacttcctatttaatcgtattagaaaatgaaataagttattcactcttgcacactctagtccaaacaaaaaagcacactactttttgagtaatgtactttttattcttgttaagacgcaggttttgtctcaaatgttgcttgattaaaactaataacctttcctttcgggtcattgttttcatactgaactgcagtaattgtatgactacctgtttccagcgttttttcttttaactgcactgttgtctgcgttgtactagttacttgatgtttatctgtatacatttgatctacaaatacgaatgtttctttatcactttgaaaattagaaagttctaattcaacttgctgaattaacgtatcctttttgatgaatacagtcggtatattgccgttttcagaagtaccatctggagtaataacttttactttcccttctccaattgacattgctccttcaggaaatacaaccatattctcatcacttgcgtttacaacttgttcttcctgttttgattgcgcgtcctctttttcctgtggagcaccgcaaccaactaataacaatacagacaatccagtgattatgaattttttcaaaattcatcccccctgtaacttcattataatttattatacaaaaataacttttaaattttgagactactttcaacactttcatgaacaaatagaatcttgctcacgattaatgtatcatactttccttaatagaacattaattttttttatgaaataaatagtaattccctcttatctatcattttagcccaacatatgaattacataccctcaaaaataaaaagacattgttagttcaatgtcttttctatgcagcaattaaaaaacaaacgttgtaatctcatctacttcttttcttggaagtttcttcggtttatctttcggaaatccgagtgaaataaccatatttatttgtttttcaggctcaatttgtaaatattggcgcagttcatcttgagctagcaatactggccctgtcattggacaagtaccaagtccctttgcatgtgcagctaacattaagttttgtgccgctaaacagctactcttaatgccttcttcttcccaaacggaatctggaacaaaagcaattggatcaaatatcttttcacggaactttgattcatatggtgttgccaaacatacaattaatactggtgcctccgagaaagctgttgcatatggtccgaaagaacgtgtaagtaatttccctgctttctcttctccattttctgctgcttttgccgcaagtttatgtaatgcatcccatgtcatttgttcaatttctttaatcttctctcgattcatgataactaagaattcccacgtttgtgaattcgtatcactcggtgcgtaacgagcacaatcaattatttcttttatatcattagtagatacttcttgatttgtaaactttctaacacttcgtcttccgtgaattacttctttaaaatcttcataattcatatattaaatcccctttttacagcgttttcaaaacttgtcctatgcttgaattatatcatgaaaaaaagccggaagaataccagcttttttcttcatgattaatttgtcactttaaacaaacgaatactctcttcgtatgcagcttgtagttttttcgtaattggtcctctttcaccagccccgaactgttcatcaccaatttgaacgactgggaatatttcaagtggcgtcgctgtaaaaaagcactcctcagcgtcatatacttcttgtaatgaaaactctcgttcctctacatcgatatgtaactctttcgctaatgtaattacgtagtgacgtgtaataccatgtaaaatgaaatgatccgctggatgtgtaatcaacttattattcttcacgataaagaaattggaatgacacccttcagtcacaataccatctcgtactaatattgcttcttgatacccttgttcatttattttgtttttgatcatgatattaggaagcaaatttaaagattttatatggcaaaacttccacctgatgtcctcttctactgtcaccttaatccctgcctccattgaagcaactggtcttgggaacgaaacaagatttgcaaaatatgtcggttgtaaatctgattcatatacatgattgcgcggttgtgtacctcttgatatttgtaaatatacattcccatcttcttgaaactgatttttttcaatcatttgatataactcttctactaattcttccttcgtaaatggtggaattagttttatttctgccatagagttaaagaatcgttctaaatgtaaatctaataaatgtggcttcccgtcatatagtctgaatacctcgtatataccatcaccaaattgaaagcctctctcctctaatggaatcatcggctgttcttccttcgtatttacaattcttccgttaaataaaatccaatctttatgagtagctttcattcttccccactcctttatcacatgattgttttaattgtacaacttatctacactcaaaagaaggaattttctgtattttaacaaacaaaaaagtgcatctcttatttaaagggatgcactcgactattcatttacttcagaaaatatttttcaatatcatctaacataagatttgcagctacaataccacctgctgtattccaaatcacttcatctacttggaatactttattatttttagaagcctgtagttgcttaaagagtggatcttctgtccattccttcgctaacgaatttccttcattattcttatctgcatctttatcagacgtgaaatagaataagtagtctccgtccatatttggaatctgctcttttgtaattccttttatcgcaaaatcatctttatcttgtaatggtggtcgtttaaatccaatatcatttaaaacaacacccgagaatgagtttttttgataaatacgaacatcacctggcacgaaacgaataatagaaactttagaattcaatttatcgcctaacttctctttcattccttcaatgcgttttttataatcatcaagagctttttgcccttctttttctttatttacagcttttgtataaagtgtaaagttttctttccaatcaccgcgtaatgtttctgcataaacagttggtgcgatttcttttagctgatcatatattttttcatgacgcattttatttccgataattaaatctggcttaagcttcattacagcctctaaattaatatcacgttcagttcctacaacttccgtgttttttaactctttcgctaaatgaggataccattcatcaccagcacgtggtttcgtagtccccactggcgttacgcccacagctaggagagcctctgcgccttcatttgttaaaacaacaacttttttaggtgtaccatttactgtcgtttcacccattgcatgctttaccgtatatgaatcttttgctttcgctgatatattattttcttttttctcttctttactacatcctgcaattacaaccatgagtatcataatgcagaacataattagttttttagtatgtatcatatgtcctccctagatgaaatcgattatcattaacatttaaagattaatgtatcttatatacattgtcaatgtatataagaaaacttttttaatacatactatttagattctatccgcttttctaaggtttctttttaaaacatagtgcataagtatgaaaataaatgttgttattaaaatgcgtatccttgttatacataacaaggatacgcatccatattgcattatcattttaattcctaatattgagtatatttaatatacgctgggtcattatatacccactgatttccaccaaggtttaaccaaccattttcatttatatatactaaataagattctggagaatttaattggcggataactgcagatgtagttgatggaccacttcttaaatttacattcatcccttgtatatatgcaaccccaatcgggcttccatcactattgcttgtctttacaaaattaatgtacgaaggatcattatacacccattgcccattccccaaatctagccatccgttactttcctgatatacaacgtaagattctggagaatttaattgacgaataactgaggaagaagttgatggaccatttcttaaatttacatttttcccaagaatataagcgattcccttcgtttgaggtgtcggttgtgggttagggggttgtggatttggagctactccaaaaatagctgctattccatttgcatacgattgacttagatcttcaataaattgtggattttttaataaatttgcatcaaacgctgtatcaataaaagcagtctcagttaaaattgcatccattgtggtttctcttaataccgcataattttctttttttgctcctcgatcacgaagaccatattttgttaatacaggattgacagctgtatgcattttttgttgctttgcatatgcagtgctgctattggataacgcattataaatataactttcaaaacctgtacccccgccgctattaatatgaaatgaaatgaaataaaataatccgcactgaaagcattagcaatattagcacgttcagataaagaaataaacacatcactatcacgtgtcattttaattgtaattgggtaatttaccgttaaaatgtctcgaacgcgtctagcaatttgaagtgttaagtttttttctactaaaccattaccaacagcaccagaatcatatccaccgtgccctgcgtctataacaagtttcattttattgccccgcccctttcttgtaatatgtttgcatttctactcgtcctattttatgtgaaatgtacaggttctgttacaattgcaaataaaaaaaccgccttatgtaaggcggtttctatcatcttgctttaaccaatttaaaataaatatatacgattgatagtgaacataacgtatgcaaaataaaataaataaaagtgctattccaacaccactataaagtaaaccaaactttaaaaaaacatttacaagtggtggaaagttcattaaattttgtaatgtactaagcatacaaaacataatgaaaaagacagagatgtattgtaattcatacggcttttttttcttactcattcttttccgaatgattatatgacataattctgctactataaagcaccctccaattaatacaagaccagaagtcatcgtcatacatccacctgccttatatttattgtatcgcataaataatcatcgttatattttctttacatactcttcatcttctgaagcaaaaccaaaactctctatgaaagacttcgccttttctgttaatttctcttgtagcactttgatttctttcacatttctttgtttcatcatttcttcaaatgtaaaatacgtatttgtaccataaccgtaaccttggtaatcaaaatgaataattagctgtgataaaacagcccgttcctcttgtacactataatctattacaccaatatatgtatcatcaactttcacacagtactgtacctttttctcacctaaactatgcgatttaaacatttctttaacaacgctttcattttctacagtaactttctcaaacgtaatcatatgttgtccatccttttactattattgtatcaataatacttcctatttatgaaaaaaaccttaagaccgtatgcgatcttaaggtttttctaattaaactaagctatacgcacgttttgtttcttcatggaacttattcgtatcgtatttatgctcaacataaatttggtgccataccataaacgcaagtacagtccaaattttacggctataatcgcctttatctgcacaatgtgcttccagtaagtttaatacatactgtttgtcgattaaatgctctgtcttactttcgtttataatatttatagcccaatcatgcatttcgtcttttaaccagtgacgaattggtactgggaatccaagttttttacgatctaatacgtgatctggaacgattccgcgtgctgcttcacgtaaaatagctttcgtagttccgttagcaatcttaaattcagttggaattttagatgcaacatcgaatacttctttatctaagaacggtacacgaagttctaatgagtttgccattgtcattttatcagcttttaataaaatgtcaccgcgtagccatgtgaacatgtcaatgtactgcattttacttacatcatcataatctttaatctcgttatacaatggtttcgtgatatccatatagttaacactttcattgtaatacttcattaattcagctttttcttcttcacggaagattttagcatttccatagtaacgctcttcaattggtgtacatccacgctctaggaagctcttacctttaaatccttctttaagagcaccacttaatgcttttagaacgctcttacctgggctaggaatgtaagagaacatttttagtgagtttggctcacggtaaatgttataaccaccaaatagctcgtctgcgccttcaccagaaagaacaactgttacatgtttacgtgcttctttcgcaacgaagtacaatggtacagctgctggatcagctaaaggatcatccatatgccaaatgatttttgggaactcatccataaattctttcgctgaaatgaatacgttatggtttttaacgcctaatttctcagcagtttctttcgcaacatcaacttcactgaaaccacgttgctcaaaaccaacagagaatgttaaaagatttggattcatttctcttgcgatagaagcgatgatagatgaatcgataccaccagataagaatgaacctactggtacatcactacgcatatgcacttttactgaatcatataacacatcacgaattgcttggatatgctcctctttcgttgcacttgaagcattgaaataaggtttccagtagcgatggatttccatctctttaccgatttcttttacgaaataatgaccaggctcgattttattaacatcaattgttaaagtttctggctctggaccatattggtacgtaaagtaatgttgtagtgacgttggattaacgcctttatcttccatcacatgcataatacttttcttctcagatgcgaagaatgtagtatcaccttgttgtgcgatgtataaaggtttaataccgaagtggtcacgtgcaccgaaaagtttcttttcttcacgatcccaaatcataaatgcaaacataccacgaaggtagtctacacatttttctttcatatgtgcatacaatgcaatgataacttctgtatcagattgcgttgcaaacgttgcacctttttcaagtaacatttcacgtaattctacatagttgtaaatttcaccattaaaaataattacatatcgatcattttcataagttagcggctgatgtcctgcctctaagtcaatgatgcttaaacggcggaagccaaattgtacatgttcatcacgaaaatatccttcgtcatctggaccacggtggaaaatcatcgtgttcatattttcaaattgatgtttttctgtttctgaaaactctctagggttttcacataaacatcctacaaaaccacacatacttcttaccctctttcagttttcattctgtctctatactactatatcaaccctatttatactagcataatcaactgaatatggcgaccaaaaactataaaaaaatcactccatttcacatttttaacaattttttatgaaaacatgaaaactaggcactcacctttctccgcttttgtcatatgatattgcaaattgatttctaggagggaataccatgagtgaagaaaaaaaagattcttctcgcccaccggttcgtaattacttaaagcaaattgatgatttcttcgagcaaacacctcttcgcaatgtaatcgctgatttaaatcattttttccaaaaaggaaaccgtttattaacattccctgtagatttatatgaagttggtgaagaactcgttgttacagctgaactaccaggtatacaaaaagaacaaatccaaattgaaatacaaagtgaatacttaaaagtctctgtaaaagaagagatacttgaagaggaagaagaacaaacatcccataactattatcgccgagaacgttccatttcagaagcatcaagattgattaaattgccgtattcaattaataaaaaagcggcaaaagcttcttatcaaaatggcgtattagaaattcgggcgccgaaacttccccagcaacatgacattttatcgatagactaatgcaaaaaaataagggtgctatgcacccttatttttaacccactaatcgcttcatatcacgtataatgtcttcgtatggcgtattactaatgccactatactttttcattacttttccgttttgatcaattaaataaaatgatgtaccatgcatgacctgaccgttctccggcttatctacaagtgattggaaattatcttttgaaaactttgtaatatcttctaacgaataccccgttaataaattccagttactagtatcctctgtaaacttttgaataaaagctttcagattttctggcttatcaaggtctggatctacactaaatgaaacaaactgaacgtctaatttctcttcttttgccatcttttgaagcttggccatatttgcagtcattggtggacaaactgtctgacaatttgtgaacataaaatctgcaacccaaactttcccttttaaatcttttgtaccaaattgctttccatcttgatttgtaaattggaaggtttctaaatcccaatttaatggtttacgaagctttgaacctgattcactacatccagcaagtacaaagagacaaaatacaaccataagaccaattattttttgataacgcttcatttataaacctcttttctctatcctaaatttaaataggttatgtttataataacaaaagttaacactacgagaaaattgtttactacatttgttcacgaaatcgtacgaatttacgtatgttacttctttatttcaagcgaattactagacaaaatatatttttttactattatttctctaaataaaagtgataaaactaattttattgttacttttgtaaatacctctccctattttttaacaattccttaaacattaatccatgttttacactgtattccttaacaacatttcggtacaatacaaatacaacgattttaaatgaggtgatgttcatggcaaagcgctatgaaaatatggataatgttagtacaaaaaaatcaattcgctcttttttacgctggcgtaaagaacgaaagcaaaacaaaaaagatttttctttcttagtagaacaatcacccgttaaacaaagtgcatttttacaaagtaatgttgaaaaaacgactatcacatggattgggcattccacttttcttatccaaacgaatggacttaatatattaacagatccagtatgggctaataaattaaagctagttccaagacttacagaacctggactctctatagaagcactacctaaaattgatattgtccttatttcacatggtcattatgatcatttagatttttcaactcttcgtcagttgaatgatgatgttctatatcttgtacctattggattaaaaaaattatttactcgtaagaaatttaaacatgtagaagagtataaatggtgggaaagtacgataattaacgaagtttcttttcacttcgtacctgctcagcactggacgagaagattcttatttgatatgaatacgtctcactggggtggatggattattgataatgaaacgactatggaaaccatatatttttgtggcgacagtggctatttccaaggtttcaaagaaattggtgaacgctttttaattgatattgctcttatgcccattggcgcttatgaaccagaatggtttatgaaagtatctcatgtttcacctgaagaggccgtgcaagcttatttagatttaaacgctacacattttataccaatgcattacggagcttttgcactcgccgatgaagcacctcgtgaagcaataactagacttcgaaataattggaatttgcgcatgttaccgtgggaacaactgcatgtactctttttaggtcaaacttttatttatagtaacgcaacaaatgataagcaaataaacgaaaaaattgaaactttacatgtgtaacgtaatgactgattttctatatccaacatataatatagaaaatcctatagtgaaactttaattagtgggatttcttcatccccactgattatttgccttcaccgatcaagcttttacgggcagcccgctacctaacctctttgctccagctaaatttgaggtagagagttttactgtccgcaaatagcaggataaagggtgttttctatgaatgaatatttacagactcgctatatcattagcggtagtgcctgtgtagctcttcttatttcttactttctatttacataaaaaagctacttgaaatatattttcaagtagcttttttattactctgctaaatacataaatccgattgcgcccggacctgtatgagtactaataataggcgttgtatagaaaatttctgattgagcaaatccactcactttttcaaccgccgctttcatactttcagctaaaggaattgctttcgcatgcggaattgcaacagcttttacgacttttccagccgtatcttgctcaaataacttagctaatgtttttacaatttggccttggctacgaactttcgttacaggattataaacaccgtcttcaagactagcaattggctttatattaagtagcgaaccgataaacgcttttcctttaccgatacgtccacccttcactaagttttctaatgtatccactactacatataaacgagtattctttcttacttcatctacacgttttaaaatttcttctagtgagcgtccgtcatttgccatttttgcagcttcaattacttgatatgctaaagcatgtgtaataaattgagaatcaacaactgttacttttgtatcagtcattgatgcagcgctatttgcagttgctacagtaccgctcattccacttgtcatatggatagaaaggacttcgcttccatcttcccctagcttgtcatacatttctacaaatgtacccatagctggttgtgatgtttttggtaattcctctgatttaatcatttcttcaataaattcgtcaggttgtaaatcaacgcgatctaaatatgtttgtccatttacagagattgataatggtaaaacatgaatgtcatacttttcgattacgtcttgtgataaatctgccgttgaatctgttacaattttaattttttgcatactatacttcttccctttccaatacgctctccttgttattatactagtattcccattgctttcaacaatttggaacgaaatttcatcaaattaattatattttcatatctaaaatgaaaaagacagagtttactaaccctgtccgtacttcgtatcatgcatttttttcaagggtatttgttttatatacatttaaataatcattccacttcaaacaattttgtaaatattcacggaaagaatacgaaaatcttgggtgtttttgtctttgaatttttgcaataaataattgaagacgagactgaattagaaacgataatggatgctgtgcctgtaggacagggatttcgaatattttaatgcaatcccctgttgaatgagtgaaataaaaacttttcgtaatcacaatatcaatcctctttttcattggatttttgaacttcctctactttgcgctgtaacacgttgtttaaagtggagtaaaatcagacttatatgatttctgtagtccttatggctagaagatttatactctattcatctccacctaattcaccttcccgtcctaaatatctctgagacgggaatctcattatccatcaattgtttaatacatttagtataagcttataaaagcgcaaagtttgtctaaattttggagattctataatttttttcttctatatattgtatacgtttatagctatagtataacaaataaataaaaaagtgcctttataacgaggcacttttcgactgcatttcttctcttttctttttcctcttactaacaacctttgataacgcaatacttacttcataaatacaaataagcggcactgcaactaaactatgagataaaaagtctggcggtgatatacaagatgcaatgataattaatgctacgtaagcataccttcttatttttattaaaaattccgccgtaagtattccaatgctagttaaaaacattacaacgactggcaattcaaaaatcacagcaaatggaactgttaaattaagtacaaaatgaaaatacttttctgtcgtaaacatcgtattaaacatttcattacctatcgtagttaaaaagtgaaatagaaacggcattacaatgaaatatccaaaacataaacctgcgagaaataatatagacaataccggtatatacattattgtcatcttttgttcatttggatgtaaacccggttttacaaataaccaaatttgtatagcagcaaaaggaattgtacaaacgatagcaaatactgtagcaatcgagaaaaaaatccacaatacatcacttggaccgagaacagttaatttcattggtaaatcttttacaagccaaaaataaatatcctttgtaaaagtaaatccaataattaaaaatagtacaaaggataacaccgtatatattactctttttcgaagctcaacaatatgttctactacgctcatttcccgatcttccatctcgttcaccacactttatttatccattacaaggaaaatacactacattttttctttcttttccttttcttgaaatgcgtcatctgtcaattctttcgttgattttttaaactcttttaacgtttcccctaaagccttcccgatttccggcaattttttaggtccaaataaaatgagtactgctactaaaattaaaattaaccctggaaagccaatatttgaaaacatttccccatcccctttattagtagtttccttgtcctactattacataattttattttgtcaaaaaagtttgaaaacgtcaacaaatccattgtcttttgtcaaaaaaattcaaaaatataatcaattatacaaatttcattttctattgctcttgtgtatgatatggtaagggaaatgacatattattttatgatagtagaaaggatttgcattatgactgaaaaaatgacacgaatgacccaatttgtaaaagaagaaattgcaaatgcaattacacatggtatcggtgccattttaagcatccctgccttaatcatattgattattcatgcttctaagcacggtaccgcatcagctgtagttgcatttactgtttatggtgtaagcatgttcttactgtacttgttttcaacattgctacatagcattcatcatcctaaagtagaaaaaatatttactattttagatcattcagccatttacttattgattgctggcacgtatactccttttctacttattacacttcgtggcccattaggatggacgttgcttgctataatatggacactagcaatcggaggtatcgtcttcaaaattttctttgtacgtcgctttataaaggcttcaactttatgttacatcattatgggttggctcataatcgttgccattaaaccactttatgaaaatctaactggacatggtttttcactacttttagcaggtggaattttatattctgtcggagctatattcttcctttgggaaaagctacctttcaaccatgccatatggcacctgttcgttttaggtggtagtgcgatgatgttcttctgtgtactcttttatgtcttacctacagcataataaaaaaggattcagcttactataagctgaatccttttttattacttatgtaattgtgatgcgataacttcctgtgtatgcttcgttaattctttaatatccatattcgcataatcttcaggtgtaatcggcttagaaattgttactgttgcatgagctggcttcatacgatttccattcgcttcaaacatcttatatgtaccatctaacgttacaggtaaaattgctacacctgactttactgccagatgaaaactaccagccttaaactctccaacttcgccacccttacttctcgttccttcagggaaaattacgatagaatgtccattttttaatagttcaattccatctttaatcgcttgaagagattgacgacgatcgctacgatccataaatacacaattcataagttccatccaagttggtacaactgggaactttttaatctctgcttttgaaacgaatccaattggtttatttaagtaacctagtaaaacagggatatccatattactttggtgattacttacaactagtactggcttgtctttcggaacattttcaagtcctttcacttctactgcccctccagctacacgtaccattttcttaccaaaccaatttgtcgttttatacacagcattatctttttcttttggcgccatcgtatttacttgtcttttaagacgccacattctcggtgtaatcgcaattacgattaaaattaaataaaagattttaaaaaacgtttgaatcatacagaacccccacctattatcattccgaccttcattatactagacaaacgaaggaaaaagaagaaaaaaagtccaaacagcaagtgtttggactttttaagcattctatattagaaacgttttgctaattcacgagcattagcaattgctgcttctttaatttcttgtgctttttcagggtttgcattcataccttcaactgcgatatattcagtatcatttacaccgacaaatcctaatacagtctttaagtgattgcgaccgaagtctacagctgcgtatgctccttcagaatatacgccacctgttgcctgaatgtgaagtgcttttttaccttctaataagccgactggaccattttcagtatatttgaatgttttacctgcgattgctacgttatctaagtatgcttttactactggtggatagctaaagttccacattggagttacgaatacataacgatctgcattcataaatgtttctaagtttgtgttcattgctgctactttttgttgttgaacttcagttaaagcttcaaagccttcacctgctgcaaatttaccccaagcagcaaatacatctgcatcaattgctggtactgtagtgttgaataaatcaattgttacaacttcgtcttgtggatgttcgtttttataagcttcgatgaaagcctcccctactgccattccgaaagaaccttctgctgaatttggatttgctgtgataaatagtacttttgtcattgtattctctcccttttttctctttatctttaattcaagatttgttttttaaaagttaataacttaccttatgtaagtataatacaaaaagttttaatcaatgtcaataaaaaatagctacttttttttcgtaagttaatgatttactttgtttccttaaaatttagtatacagatattaagaattctttcgtataaaaaggctacctctacaacttatagagatagccttctattacatattatttttgaaatacatgttttactttttcagctggaatattactcccgcctctaccttttacatcttcaatcatcattgtaatgaccatatctggtgaatttaaatcaaatgcagcgaaccaacctagttcttttccttcggcctcttttgatacttttaattccgctgtacctgtttttccagcaagagtcataccatcaattttagcaattttccctgtaccatctggatcattaattactttcgtcattgcagtttttaatatatcctgatttcctttagaaattacattttctttccaagcttttggttgtttatctgttttaataatatacggtgacggaatagttccatcatttacaatcggcgcatacgttaaagctaaatgaagaggagtcattaatacttgtccttgtccatatcccgtatctgccatttgaatatcatttttaatgccgtcatttgcaattttagaagcagggaatccatattcaattggtagtttctcatcgaatccgaattttttcgcttcactcataaacttgtcttttccgatttttaaagcttcttgtgcgaagtaaatattatccgagtatttcatcgccttatcaaaatcaatcggatttgcatctttcacacgcgttacatagtaattaccccaagaagaatcttttgtccattttaatccttcaattttcaactcttcttttggatcaatcgttttcgtttcaagaccaattgcagctgtaataggtttaaatacagaacctggtaccgacaattgtgtaaaacgatttgtcattggttttttcggatcattattccaagcttcgcgttgtgccttcgatgtccctcgtgcaattatattaggatcatatgctggactacttactagtgcaattgtttctccacttttcggattaattgctgcacttgaaccagcttcgcccttcatttcattatacgttttttcttgaacaacactatcaatagttaaagttacattttctccatcaacagcatctgtttttgctaaatttttaatttcttttccttgcgcatcttctacaaagacacggccacctttcttaccgcgtagcttttcctctaatacttgctctaagccagctttaccaactgggtcatcagcttgatagcctttcttttgtagcgtttttaaatcttcagcatttacctttccaatataaccagtcagatgagctgccgcttcccctagcggatatgtacgaacatttacaggttttgttgaaacacctggtaaatcaatgtacgtattttgtgttgccccttcaggcaaaattccaattggtacgagataccctggttttacccatttagcagctaatttttgatcaatttcttctacagacgtatttaataacttcgctactgtttctttcgtttgcggagcagtatcgcctaacttttcaggaatcaatccgatttcagaagctttcccattcgttgcaagaccttttccattacgatcgtatatttcaccacgttttggctgtgttgtctgcatacgcactttactatctttcgtcatgccagggaaaataaaatcaggagtccaatctattttccaagattctttatctccatctttttcttttaccatttttgcttcatgaccaaatgtgattttaccaccaactgtatccatgcttactttaaaaggaacaggaccttcatcttttttatcttcttttacttcccctgtttctacctttaagtctttcacttcgataccagaataaattttttcatatttctcagtaaactctttctttgaaatatctttttttgcattttttgatagttgatcatacatatctgcaaatttttgtttattccacgcttttacatatgtatcaaacgcttcttgtggtttttcttctttaccacatccaactaacatgaatgttaagcaaagaaaaagaatcccccatatctttctcaatcgattctcctcctctttctatattagtacttttgaaaattttagcatttttacatgctacctatcattatagcactatcgaatctcatctataaacttatattggtgaatataaataaaaagattgatgtgaattctcacatcaatcttttttattattgttgcttctcatatacatggtaataatacgtatacgggtttttttcatccgttaaacctttttctacaaaaatctctttccaatttgtcatatccatttctgggaagaatgtatctccttcaaatgcataatggatttttgttatatataacttgtctacataaggtaaaaagagatcgtaaatttgcgctccgccaaaaataaaaatctcttcttcatttttacatagttcaaatacttcttctacagaatgaacaacttcacacccttcaacatgatacccttcattacgagttacaataatattacgtcttccaggcagtggtctaccaatcgcttcatagttctttcttcccataataagcgggtggcccatcgttgttttcttcacgtattgtaattcactcggtaaacgccaaggtaaattattatctttaccaattactctattttcgtccatcgcgaccataaatgaaacaatcattttttcatctcctctacaattatactgcaaccggtgctttaattgctggatgcggatcgtatccttcaatcgttaaatcttccatttcaaaatcaaacacagatttcacatctggatttaatgtaagtttcgggaatggacgtggttcacgtgccaattgcttttctacttgttcaaaatgatttgtataaatgtgtgcatctccaattgtatgaacaaattctcctacttcaagaccacattcatgtgcaattaaatgtgttagtagtgaataacttgcgatgttaaatggaattccaaggaatatgtcaccacttctttgatatagctgacaagaaagttttccgtccgctacataaaattggaataatgtatgacaaggcggtaatgccatactcggtacgtcttcaggattccaagcagaaacgattaaacgacgtgagtctggtgtttttttaatcatttcaattacatcttttaattgatcaagtgtctcaccagctgtcgttttccaagcacgccattgtttaccgtaaacgtctcctaaataaccatatttatttgagaactcatcatcttctaaaacgttctttttaaacaattccatttgctcatcgtactgtactttaaattcttcatcttgttgtgagcgaagaccaaaatcagtcatgtcaggaccagtatactcatcactttctacccagctcttaaacgcccattcattccaaatgttattattatgctgcaataaatagcgaatatttgtatcacctttcataaaccaaagtagttcacttgctacaaggcgaaatggtactctttttgtcgttaataaaggaaatcctttgctcaaatcaaaacgcatttgatatccaaatacagatacagttcctgtccctgtacgatcttctttcttcgtaccatgttccattacatggcggcataaatttaagtattcattttcagcatgtttcatatgtaggaaaaccttctttcaatcgtatatggaatttatcataacatgaaaaatggtaaatttaataatcttaattaataaaatttcttgcgctaattcttacaaaattattaactttccatattttaaaaggttttcattttctattaccgaaagtatagtgcggtagatcaaaatttatatttggaggttagaaatatgtctaaaattgaaacacctgttatgacttctttacaaaccacggttgaaaaaatgatgaaggatttaaatgttcctggtgttgctgtcgctgttataaaagacggtgaagttattctttcagaaggtttcggctatcgtaatatggaaacaaaagaggctgttacaccgaatactcgattcgcaatcggttcctcaacgaaagcgtttggtacactttcattaagcttgttagcacagcaaaaaaagtttaattgggatgctcctgtcccgtcttatatacctaactttactttatctgaactacttgctagctcacaagttacaggacgggatttagcttctcatcgaactggagtgagtcgtcatgaggctctttggtacagttcttccttatctcgaaaagatctcgttgaaaaaataaaacatttaccacttgatgcaccgttccggactgcatttctatataacaacttaatgtatgcaacaattagctacattgttgaaaacattacaaatcaaacgtgggagcaatacactacagaacatattttagaacctttaaatatgagacatacaaacttctctgttaacgattcacaaactacagatgattacgctttaccttacattgaaaatgacggtgaaataaaagcagttccattccgtaacatcgatacagttggcgctgctgggtgtattaattccacaattgaagatatggcaaattgggtacttctccacttaaatgaaggaaaatttggagatcatgaattaatctcctctgaattattacaaccaatgtatacaccacacaattcaattccagaccaaccggttttatcactccctgaatctccattaaatagttacggtcttggttggtttattagcgcttatcgtggtaaaaaagtgattcatcatggcggtaatatcgatggattttcagcgcttgtttcattcataccaacagaaaacataggccttgttattttaacgaatgctggaggaacattacttcctacttatctcgctaatcaaatttatgacgaactacttgaattagaatccattgattggcataaacgtgctgtagaagatactaaaaaaatgaaggaaatgatgaaagaagcaactgaatccctccctgaacaaattaaagggactacaccttcgcacaagttagaggattatactggtacttttgaacatcctgcatacggaacattacaagtatacaaacgagatgattcgttatatgtacaatttatggaaatggatattcaattagggcatcatcattacgacatcttctccacaaaagttgacttattccaaatgaaaatgagcttattattcgcttatgaaatgaatgtaagtggtgaattcccatcccttcagttacatgtaccagctacattaagtactcagccgcttacatttaagaaaattaaataagtatcttgatgttaaaaaataaaggtaggtgcgaatcacacctaccttttctatttcatatcaatcttatctggttgaaaccaaattggcttcgataactcaaagttattatgatcctctaaaactatagtaagacgctctaacatatcatctaacatatgcggcgctgctcgtaatgtccagacaactgaggagaaaactgtcatgccaacgtacaccgtgtataatttccagaactcctctggtattttcctattaaagtatccttctatttgtccgattgaatacggaatactaatatcccttgcaaacagtgcaatttttacgaaatcatgaattgggtcgccccagtcatagccattaaaatcaacaacacctacatattttccatcccgtacaattatattttctaaatgaaaatcatcgtgttgaaatcgattcgggcggctctttaaatatatttcattttcttctataaactttatgattttatcatcattttttatttttattccgcatgttttgtatacctctacatatttactatgttttttcatagctctttcataccatggaagtatatccttaggagcttcaaatgtatgcatttttgctaaatcttttcctgcctctataccaatatcatattgttcttttggtgaatacgtaggcaatagcttcttcgcatcttccccttctaaatatgaaaaaatactatagcatacaccttcttcttccaatatacctatttcaattggcctttgtgcctgtacgttacgttttaccatttcatttaaaatttgaaactctattttctttctttcatactcttttatatcgcctgtccgaaataaatatttttcattatttgcattcgtaattacatatttcttatctggagagaaacctttagaaatttcttcaatattcgctgcatcttttactatttgtatattgctttgccgtgctgtaattatcttcatatctattccccttacatttctgcatttggtgtataggcaacttctacaataaatccattcggatcgtaaaaatcaatcgtatagtaaccttccgaataatgattcatttcaattggaccacgtattaccttcactttcgtactagaaagaaaatctgctacttcatcaactacttctctatgaatagcttgataacaaatatgtctaggccctaacgtccttacaatttcctcatctacttctttaaagtatatttcactttctcctgtgctatatgctatttcatttaactttctccacccaattatggaaaacaacttattataaaaagaaatggactcctctaaatttgctacccaaaattcaatatgatgaatgcctgctcgcagtgtattcatattaagaatacgctccttgtactacttgcacaatttccatcggcttatgaaccatgtaatctggtgcatcttttttcactgtttcaataacatcatatccccaagatacccaaattacgttcactccagcctttttacacgctgctacgtctcgctgttcatcaccgacatataacatatctttctctgttattttttttgatttcaaaaatctttttatcattttatctttaccgaacaaatttttagaacaatacacttcttgtatattttctatatcattcttttgtaaaaacgcccgaatatgctcttctgagttcgatgatatgactgcaattccgtagccttttttatgtagttcatctaatacttctttcatcccatggaacaaaacgagattttttatagccggctgatataatttataaaattccaacgctaatatcggtaatttatacagtggtacattaagttgtttacatctctctggcatcgttaatttacgtaaatgttcaatttcgtcttcctttactgctttatacccatgtttttcagcaagttgattataaatcggtacaaatatattttgtgagtctactaatgtgccatcaaagtcaaaaacaatatatttttgcattcccatactccctttgcttcttttttctaaacctatgttattcaacaacatagttgtctgtcccttctataaaaataaaaaagaacaagattttctcttgttctttttaagaaagccatttcggcggtacattcgtattccaataaatatttcctaactcatgatgtccagagtatccatcatcaaaacggtggtaatggaaattaaaataataaccatcttgcggtggatgatctcttcttacatggaaacgcaataaatcatttcctgatttcgtatcgtagacatgaaaaatcttttcattattcccaccagctggtttttgagaaatcgctaatgattgtagtgaatcttctggtacatcactagcaagctcagcaattgcctcttcaattttcggtaatattacatctttaaactcatcttcaattactggaccaattttagtaccaaacttttgcatcgactgcttctctgcttcttgcattgcataagtaataaaagtatcggtggttaacctgtcattcgcttcttcatatgtgtaggacgtgctctccaaactttgttgcccagctgtgctcgtaggcttgtccgcagctttggcattatcaagtaatatggaaggaggcgtcactaaaccaaatgtaaacacggtaattagtgcgactaaggtttttctaaaccaatttggcatttatgttccctcccctttcactcattattttttatataacggtggtttcttctattatacaaaatgattgtaattattgcactttacaattttgttaacgttcacatatttttcacttgaatatgaaattgtaagatttcatacaataaaaatacaacaaaaataaggaggcgatcagatgactttagatgtcatgtattccgccgcaagtatactcgttttagtatattttatttatcaatgtgttacagactagaaaaagagccatcaatggctcttttttaatggtagaaatacaatccatacaatcaataaaataaaaacaatgccaccaatcacagctggcaataaataaaaccgggaaagtataactattccatataaaagtattgctggtagtagtaaataacgatctgccttccatcttaacaatagtaatttcccttcatcacaatatacacgaagaaacatcttattcgtaaattcagtccaataatcacgtgcatagcgagaaattgcaactacagcaaatacgagaacaatagccgcaatccaccttggagtcataattatacttacagtactgatacatacaatttgaatataaaatattcgtgcagtacttgtacggaaaaattctttcaaaaaagattcgacaatacgagaatcagcttttttccctaaaagtcttttagagcgaggaaatatccacggttttttattcgaactactcggtttagccgcatgaccaccaacttgcataattccgctcgtccagcgcatgctttcctccttttctttctcgatttctttaaaaaagaactttttataattcattttctcttttactaatacactacttaagaaaattactagaccgataaataaaattgaatacaatggatttttataaataaaaaataaactaattccaaaaaaggacacgctcatagaaaatactacattttttacaatccataaaacccatcgtttccccacatgtacatgaataaatctcgttaacaacgacaacataaatcgaaatatagtaaagaatacccaaaataataggacttgtatccctgttacttcgatactttccatcaacaccggtaacataataacgactacaattatattcgttatcgctattcgaacaaatgtgtacatcatgccatactggactaattttcgcatatgtgttgcatacgaaattaaaaataaactatccgcttgctcaaaaaatgaacgaactcctcttccatatgtaatcacataaaatgcgagtaatcctaatccgaaataaatcgtctcttccgttgataattcatttatccatagcgatcgataatagattcccataaatataagtgctggaataataatatataatgcgactgtccaatctgttaccgaacgtatagacttccatttccgctcaagttcatggcgtaatctcttataaaattgttgtttaatcatgttgttcacgccttacaattacatcaaagcagtctaataatgaactacccggcatttccgctaatatttgaatagattctaaatgtccatctgcgactaatgtaccttgtgaaatgagtaaaaatctttcacaaattttttcagcagtatctaatacgtgcgtacaaaataaaattcctgccccgcgctctttttctttatataaataatttaaaaactctttcgtagctaccggatctaaaccgataaaaggttcgtcaatgatataaaaatctggctcagttaaaaacgccaatattagcatcgatttttgtttcatgccttttgaaaattttgataaatactcatgtttatgcttattcattcgaaaagtatgtaataattgttccgctcgttcttcccaacttcccatttcacttccacgagctgccattaataattcaatatgttcccagagcgtcaagtaatcatagtatgttggatgttctggtacgtatgcatacggatttttcttttcaccgaatgatatttcaccgtccatatttacaagtaatccgagtatcgttttaatcgtcgtactcttcccagcaccatttgctccaataagagcaactagttcacctttttcgatagaaaaagctatatcatgaattattttttcgcctatttcatatccagctgagcggatatttacttttaacatgcattccccttctttccatttctaatacaatcaaggaaaagaataacatataactatctatatatcattataaaatatttattttcatagcaggaaaaaacattttttaacagaatattaaatgtttgattacattttattggagtggataatatgtcttttcaaattcgtgaagcaacgatagatgatatagacgcactttgttctttaacgaaagaattaaaaggttcctctatttcctatgaagatatgaacaaccgattacaattcgtacaaatgagtccgtttgattttttatatgtttacgaggaagaagaagctatatttgggttacttggatttcgtatacgtgaaaatttagaagatgtaacacgttatggagagatttcaattattagcgttgattctaacatacgacggaaaggcattggacaagtgttgatggattatgccgagcaattagcaaagaaacataattgcattggcacatggctagttagtggaacaaaaagagtagaagctcatcctttttacaaaaaattaggatatgaagtaaatggctacagatttgtaaaacatttttaaactacttataaattgaagggactataactatgacaaacattaaagcaattttcattgatcgtgacggtacaattggtggtgacactacaatacattatccgggatcttttacattatttccgtttacaaaagcagctttgcaaaaactaaaagctcaaaatataaaaattttctctttcacaaatcaacctggtatcgcagatggaattgcaactgtagccgattttgtacaagaattagaaggcttcggttttgatgatatttatgtatgtcctcacaaacacggtgatggttgtgaatgtcgtaaaccaagtacaggtatgctgctacaagcagctgaaaaacacgggcttgatttaacaaaatgcgctgtaattggtgatcgctggaccgatatcgttgcaggagcaacagtgcatgcgataacgatattggtgcgcacaggcgctggatacgatgctttacatacgtaccgagacaaatgggcacatattgaaccaaactacattgcagataactttgaagatgcaacaaactgggttttaaatcaactataatacaaatgaaaattttgattcacccgaaataatttaaaacatagttaaaatagcctttttggcaaataattgtattccacaaaacggatcacctcaaaaggtagcaagttcccttttgatacgcaaacattgcaattcaaattatattttttattagtaacagcaattaacgtaaagaaggaatagcttagtggctatcccttctttattgacttctattatttacatttgttatctgtttttattgagtattctcatcgtttttatactccaaaatatcccctggctgacactccaaagctttacatatcgcttctaatgttgaaaaacgaaccgcttttgctttcccatttttcaaaatagaaagattcgccatcgtaattccaaccttctccgaaagctccgttacactcatttttcgttttgctaacatgacgtcaatattaataatgattgtcatatccgccacctcagaccgtcaaatcattttctgattttatgttaattgcctcttgtagaagtcgttggaggatagcagcaaaaacggcgataacgagcgaagcaaaaacgataatgagtcccactaacccaataggagggtccatttttttcgctataaaatgaaaaagtggcaaacttaatacatacaaaccactgattgtaattgcacagcgctttatattctttaacgcctttactgataattccgagaacgctgtgttctcatcaatgtactgtaaaagattgaaagcctgataaagagcaacgtaaaaaggcacagctgctacatacagtacaattaaaacaagatattttatcggagcaatgttaggatacaaattcgctgtgaaatccgccatttccggcactaaaaatatgcataaagcaagcactgaaattccagcaagaaaaataattacttttaagaacattgttgaacttcgtttaagattcatttacaatacctcacttatttaatggcaacataattttatcacaacatttattgtttaacaataaataaatatcgttttattttcgtcatgttttttaatttaggcaaaaataaaaaagaatttctcattacaaagaaattctttttcttgaaaatgtctctttcaacttaattttttaaaacgttaattcgtaatggaaataacgattatctctcaaataaccattttcagcgtataatcgttgtgctgataaattatcaatctccgtttgcagctttacaccttttgctccattttctaatgcgtattctttagcagcttctaataattttttacctgttccggctccacgcttcgccgcttgtacaaataaatcatttaaaatccataattctttcattgaaatagaagaaaatgatggatatagttgcgtgaacccaatatattcgccgtcttcaactgctacgaaaataacagactcttttttctcaattctatttcgtaaaaatacttttgccccttctaaatcagaatcttgcctataaaacatgcgatagttattaaaaactgatgctagtccatctaaatctgcaattgttgcctcatatattctcattttactccattccccttccaatactgtctcattatatccgttgcccatttaggctggtgtatttcttctgtcggcataaactctttcattattggttttatatccaatataggagtgccatcaatagcatctaatccctcaacaataattgatttaccttctcttttgatcatctttacaattgttacacctatgcgatttgggcgatttttcccgcgctgtgcaaaaatacctacttcaggataatccttattatttctaggatgtctagcaaaatactgaatttgctcgtcagttactttatgaaaataaaaaacaacttcaatatgagaaaaatcttcaaccccttgtatactctcttctgcatacatttcagttaaagttatacgagatcttacttctccccactcatcatcttttatttcctttctttcattatgtacaaatgcgattggttgaactgaaaacatacgcattcccccttaaatgtaaccacttacattataaaatattttctgaatgttttccagatatacgaataaagtttacataatataattatactctatctagagctaccttgactgcttcaattgcatgtatatgagttgtatcaaatatcgggacagatacgttttcttgctttattaataaccctatttctgtacaacctaatatgattccctgtgctcctttttgcactaactcttcgatgcctcttttataatattctctagattgagatactatttttcctaaacataattctgtatatattactttatttatttcttttctatttttttctgatggtactattacttttatattattttcttctatacgtgacttatagaaatcttgctccattgtatatttagttccaagcagaccaaccttttgaatgtcttttcttttaatttcttttgcagttgcatcagcaatatgtaagactggaatatcaattttggcctttatttttccaactaccttatgcattgtatttgtacaaatgattataaagtctgctcctcccttttgtaatgaatatgccgcattccctagaatttctccagcaccatcccaatctccgctagactgacatcgttcaatctcttcaaaatccacactattaatcaaacattttgctgaatgtagccctcctaatctctcttttatttcttcattaataattcgataatattcagaagttgattcccaactcataccacctataagacctatcgttttcatataaacacctacctaaacttttttataaaactaataacaacgttttattatgtatattatacacaataaaacaagactttaagtttgggatataaagtcttgttttaacgtaataatatagaataattgtactttcatttccaaggaaatttttatagaatattctgaaattaataatctgatatttttataaattctttatacttataattaaaacactctcgatacaactctttgatttcatcatatgatggaacacgtgggttattagctgggctaccactttcaattgcatctgatgccattttagagatagcattttcaaattcaatttcatcgataccgtattcttttaaatttggaatacgaagatcatagcaaagcttttttatttccccaatcgtgtagtctgctacttcctcatcagaattcgaatacaaatccttatttaagttacgtccaatttttgctaaccttttcactgcacttgtttttgtaaactctaacactgtaggtaatagtatggcatttgatattccatgcggtacatgaaataatgctcccactggccttgacattccatgaactaatgtaactgatgcattcgaaaatgcaattccagcttgtaaggaagcaatcatcatcgcttctcttgcctccatattatgtccatcttcatatgctatacgtaaatatttcataatactttcaatagctgaaagagcaagtacatctgtaagtggttgtgaaaatttagaaatataagcttcaatcgcatgacataacgcatctattcctgttgctgccgtaatttgtggtggtaacgaacttgtcaaaactggatctataattgctactttcggtataaaactaggatgcttcatcatcatttttacatctgtttttttattcgtaattactgctacacttgtaacttccgaaccagtaccagaagttgttggaattgcaataagtggtagtggattgttttctatttcaatatccttttggacataatcctcaacttctccaccatttgtatataaaaccgctaccgctttcgcagcatcaatacaacttccaccaccaataccgataataaaatcgcacttttcctctttacaaagagataacgcttctaatacgtgtatatttgtaggctcagcatccactttattatatgtactaacaataatacctttcttatttagttgttgcatacacttttcaacatatcctaatttctccataattgtatcagtaactataaaagctcttttccctaacttttttgattgttctcccagtttttcaagcgaattccttccatataataccgactttggcatacgaaactcagaaacctcttgcaagtcccccaccccttcttatcctaattaatattttataatataaattatcgatttgatgaatctttacgattcaaattttttaatagagtcctgttaaagtatagaatgcgataactaaaaatacagcaaccgttttcaaaatagtaatagcaaatatatctttatatgactgtttatgtgttaatcccgttactgtaagaatagtaataatagccccgttatgtggtagtgtatccattcctcctgatgccattgatacgatacggtgcataacttctaatggaatatcaaattgattggccgctgcaataaatttatctcccattgcgcttaatactattcccattcctcctgatgccgagcctgtaattccagctaaaatattcgtcgttactgcaccattcactaacggatttgtgaaagtagcagagatgccatctctcataattgcgaagcctggaagtgctgcaatgacaccaccgaatccaaactcagctcctgtattcatcgttgcaagtagcgctccaccaatacttgtattcaatccagcttggaaacctgttactactcgcttccaatataataataacgttgttaagatccctataataagtgccaattctacagaccaaattcctactactgcacttaattctacttttccaaatgctttcataccaattgcagaaaaatcaaaaccgcttggataccacttcggtatcataatagtaaacactttattcattacacctactaaaataagtggtataaatgcaataagttgttgcgctcttgtgatttcaatgttattaattaatggcatatttttttgttctacttgcaaagatgctgccatttcagtatttccatcattaaaaccaaaatatccttcacctgctgcttttgccttcttacgtctactctctaaatatagtaaacctaatgtaagaacaaaaattgctcctacaatcccaagtatcggtgcagcataaatatccgttttaaaaaatgttgtaggtattacattttgaatttgtggtgatccaggtagcgcatccattgtaaacgttactgctccaagaacaatcgttccagggattaaacgctttggaatattagcttgtcgaaacaacttagctgcgaacggataaacagcaaacactactacatacacactaacaccactatacgttaaaatagcccccattaatacaatcgctaatatagtacgtttttcaccaactaactcaataattgtttttgcgatagaatctgcaattcctgacatttccactacttttccaaatattgctcctaataaaaacacaggaaaatataattttataaatccaaccattttctccataaagatattagaaaagaaaggtaatacataactaggttctgtcaaaaatactgcaaataatgcaaatatcggcgcgaataaaataacagaaaaacctctgtatgctacgaacataagtaaacttagtgctaataatataataactaactctaattttacccctccattaaacagaatattctaaattttattgataaatttctactaaccttttaattctgacatccctcctcttattcatacaaatttttatgctaaaaatgtctaattataattattcgattacatatgaaaaatccctttaaacagaaacgaattcatcgtcatacgttataaagggattgctagaatctatatttactgctgtattaaatttttctctatacaaaaatgatacagttcttcaacatctttcactatgtaggtcgcactaacttcagtcagttctttttcacagccatagccatataaaacaccaattgaagcaattccattctgatttgcacctattatatcgtgctttctatcaccaatcattatcatttcttctttatttagttcttcatgtgtttgtaaaatatgagcaattatttcttctttttttattctcgtaccatctaaattacttccaatgatgtcttcgaaataattcgttaattgaaaatgctctataacttgtttcgcaaatacagtgggctttgaagttgctacgaatatgcgattccctgaactttttaattgttgcaagagcttcagaatcccctcttatacattattttcaaacaatccacgctgctttaaatactcacggaagtaaaaaacagcacgttcaacctctccttcactcatattatatctctctatgaatgattgctgaataggaggacctataaatgaatctaactcacttatatgtacttcttcaattcctactttttttaatgcatataaaaccgagtttacaatcccttctttcggatcagttaaagttccatctaaatcaaatagaaatattttatacatgcttcattcctccacttaatttgctgtataaataagtgctaacatctcttccacttctccctattatactattattatctattttttcgaaaaatcaatttccctatgtcacatactttcagttacaaaatacgatagatatgatacagtaaaaaagttacaattattttaatagaaactggtgaaacaaatgtcaattacgttaatttttataatggctttcacaattgtgatccacgcagttgaaacaagctcttatagtattcgattagctggagtacgtttaaagaagattgcggttgccttgtctgttgtaggaatggtgttacttatttcaagaacatcaaacttactacaagcctttttaatcggtggtattgtcgatgaagcaaaactagattcttctattaatttagagcatattatacgactcgtactattatcggcttctatcggtactttaatcgcgatcattctttatccaactttgacaaaattatttggatatgtcattcaaaactttgaaacagacggttctttcattcgaatgatgaaaacgaataacattcaaaaattaaagtacacaaaaaaatatgtccgttttccaaagttagaaatgattcatagactgcgtatcggtggtattccaaagcgtattatgcttattaacatgtttgctactgctatttatacagcaggggtactttcagccctttacgcttcttttttaaatccagattatgcaacaaatgcaagtacagcttctggccttgtaaatggtttcgccactattttattaactgtattactcgatccacgcattgctcttttaacagaacgtgctctacaatcagaaagcggtgctgaatctatgagtaaaatgtatggttggctaatgatttctagacttctcggcacattattagcacaactgctatttgtaccaggtgcttactggattttatggattattgaactgatgcattaatttactagaaaggtgaatttatcaatgaagatcaaaacagagaaagatataattcgcttaatagaaaacgacgaatggatgatgaatgtattacaaatggcaaaattactagagctacctgattggtggatttgtgccggatttgttcgttctaaaatttgggatactttacatgactatgaagctaaaacggctatgcctgatgttgatgtgatttattatgatagtctacatcaagatgagatatacgaacaatcattagaaacgaaattaatgaatattgatgctactatcccttggtctgtaaaaaatcaagctcgtatgcatgtagtgaataatatgccaccatattcttcttctgttaatgctatttctaaattccctgaaacagcaacggctttaggagttacacttgatgaactaaacaacgttatcttaacagccccatgtggtattgaagatgtcctttccttacaagtgaaaccaacagctcattttcttgaatcgaaagaacgattacatatgtacaaaaacagagttataaaaaagaattggcaaagtaagtggcctaacatcacaatcacatatccagaaatttagaaagggtgcctctcatttatagaagcacccttttcttcatttcaaaaaatgtatgactgtttctgcaaatctatctgcttcctcataatgaggtgaatgaccgctctcttcaaatacgatatacttgccgtttcgggcatctttattaaatgttttaatttgttcttcacacgttactacatcatgttttcctactattaataacattagattttgtacatcttttatttttgataataatgatgtatgacatgctccctctaattttaatctatcaaagtgaattttggagcgatttgaaaatatttcccactcttcatcactgtataaactctcatctgtcctattttccttattattgtaaatctccattcttttttcttctaattcagcgcttagtcttatataagcttctaacaactcttctgaactagcatcgctagatgaataagcaaagcattcttttgctatttcttcttttccatacttttttaataaatgtcctgtcttttgtaacaaagccctacttgttaatgcaaaattaaaagttggtccttcaaatattattttctctattgaacttggatatatcgacgcataaagcaatgctacatatccaccgaaagagtgtccaattatagaccacttctcaatttgtaatactttttttaattcctcacagtcttcaatcaaatcatttaatccaaaagcttcgtcttcagttatttcttctgagcgacaaacacctctttgatctattataattacatatagagaatcttttaaacgttccgcttgatgaaatgaaaaatcataacaactttctcctggtccaccatgcaagtataagactggcttatttttaggatttccatgtgtttcaacgtatagctttttccctctaatattcatgtatttccctgcttctatcaaattttcctttataatcaccacccccctttttttactgaatattataacatttaatattaaataattcctattacatttaagaagacgataattattgcaagtggtgctacaaatcgaagtaaaaatgcccaacaagtaaatactttctttccataatttccacctacaaaaaactctgcttctagtaccttcttctccattttgaatgaaacgaaaatactaataaatagtgctccaagtggcattaatatattactagataaaaagtctactgcatcaaaaatattctttccgaaaatcgtaatatcactccatactccaaatgataacgctgatggtatacctaccaagaaaatgccgaaaccgatcatccatgataatttcgttctcttttcttgttcaccatttgctaatgctgaaacaacagtttctagtagagaaaatgctgatgttaatgtcgcaaatgtaaatagtgcaagaaatactgttaagaaaaatccaccgaatgggatttgactaaatacagatggtaatacgataaatagtaatccaggtccttctgttggctccattcctaatgaaaatacggctggaaaaatagcaagacctgcaaataatgaaacaaataaatttaatccaacaattgttattgctgattttggtaaactttcttttttatttaaataggaactatacgtaaccataattgaaatcccgatactaattgcaaagaatgattgccccattgcgaacaaaatactttccgaagtaatctttgagaaatctggttgtaagaaaaacttcacacctttcattgcatcatcaagtgttaacgaacgaataataagagcgacaaataaaacgaacaatgctggcaacatatatttacttgctttttcaattccgttttgtacaccctttgatacaacccatatcgtaatgaacataaaagcgaaatgtcccataatagcccaagcaggattcccaattgtttcagtaaataatgtaccgtaattttgtcctggagtaatcagttgtccagttattcctctgaataaataaattaatacccatccacctacaacactataaaacgaaagtagtataaaacaagttccaacaccaaggcgtccaatccaatgccatcccgtatttggtgcgatgcttttaaatgctccaactgcttgtttctgcgtactgcgtccaatcataaattcagctataagtagcggtagtccaattaaaacagtaaataatataaatattaaaaagaacgctcctcccccactcttcccagcgatataagggaacttccatatcgcaccaagtccaattgctgatccggctgccgccattataaaacctaatttcgaagtccattgctccgtctgtttcatctcattttcctcctaattaaatctttttatataaataaataaattttataaacctattcaaataaaccctccatttcttcttccatataataaaaaaatggcctagcatctctatataaagagacgctaagccatttacttaacgcggtaccacccttattgattccattatgaatccaccttagtagtaatcgtttgattacaaacctaatatcgaaggttaaccgttaagatttactaagaatgtaattccgttccaccttactgctcctaggcgagttcaggatgttatttgactatgtcacaccaacccatagctctctgtacaaatacatgaccttactactcctattcaacacattttaatatttagaatatattttcttttgaaattaatatgaagtatatctgttatatttgtaactgtcaagggtatattgatttttttgtcgaaatggttcatatttcaactgacttttactaagcttattagaaaaagaaagagtctatattttcaccttttcaaacgaactataaaaaaagaatcttcgcgataatcgcgaagattctttttacggtatgagacgagtacaatctctcggaaaagcactcgcctctcgtacatttgttaattctaaaagtttatatacaaccctttctaacccaattccgaaacctccatgtggtggacaaccatatcgaaatgtatttaaataagattgaaatttatctgggtgtaatcctttttctttaaacgaagcgagtaacatttcataattatgaattcgctgtgcccctgacgttatttctaatcctttatataataagtcgaatgaatcagtaatagctggattctctttattcggcatcgtatacatcggtctcgcttttttcggataatgcgtaatgaaaacaaattcactattatatatttccttcacatatttccctagtaacttttcaccttctgtatctaaatcccctacaggagattctttacgatacttacttttcaaaatttcttgtgcttctaacaatgtaattttaggtatttcagtaataacaggtacttctatttgtaatagttgtagttctatttcacattttttcgctacttgttgaaacatatatcgtaaaacatccgtttctagttgcatcacttcataaaaatcatgaataaaaccaagctctacgtctaacgatatatattcattcaaatgacgggaagaattatgatgttccgctctatatacaggtgcaatttcaaaaactcgttctaacccacctgccaccatcatttgcttatagaactgtggtgattgtgctaaataagcttctttttggaagtatggaagcttaaaaacatttgctcctccttctgccccttgcgaaacaattttcggcgtaaagatccgtgtgaaatcgttctctataagaaattcactaaagctttgaacgagtgtagatttcactttaaaaatcgctgcggttcgctcatgccttaatgatattactcgctcattaagtagttgatctaagccaacttgtaacttctttttatttatttcaaatggaagtggctctgcactgtttattactttcacttcatgagcaagtacttcaacacccaattctgttttcgatgtctcgactatttcaccaattacgtggacgacactttctacatcaactttatatccagccaattcattttctaatacacattgaattactcctgttctgtcccgtaataataaaaaactaacatttccaagatgtcgaatcttttttacccatccttgaagtaatacaacctttccactttgctttttacattcttttgtgagtgaacgcttcattattgaatccattatttttccctccagtaattttatatttatttacgttattgttgtcatcgtcatcatccacggtcactcaccccctttcaaagaatacaaaaatccgcccctataaatagggacggatttttttccgcggtaccacccaaattgtcatactgaccatcttagccctgataacggtaggtaccgtttgcttttactaataatcacgttcaaagcaacactcacaggtgtctttccatcatgcggtatcgcaacctttccagcaactggctgctctctgtagacctttgcaccatgtacttttcctgatcatcactttttatatttacagagtattctaactccttatcttataaaacgcaagctttttttgaaacattctggttttataactcctaacttcttctaaagtgtgaaaagttaattttgtaatacatattcttatgtattacatccaaaattacacctttaatattttccaatttttacataaaaactaattcatttacgcatattaataaaaattttaaagcgaggtgtgtatatgcaaaaagcaattagtttctttctccttttgttttgcttaattgtagtaaacgaaacgtatgcctattcaccaaaatctttaccaatctctcaaaactctgatcaatggcaagtgaatattgataaaccgaaaaaaacaaacaagaatatgcttcaagctaaaaaagatgaatttcaaacatatcatttttcagtaaagaatgtcgggaatagtgaagtatataatgtaaacgtcgaagtattccgcaacgaaccaaataagaaaacgaaatatgaactcttttccctaaaggaaagtcgtttggcaagtggaaaaactggatttgaacacgctaatttacccgttgctacaaaagcagatgaagttgatgttattattacatggcaagaacacccattccgatcgatgcgaaatggtcaaaaagttgaatctagaaaatttaaagagcattttgtttttaaagaagctaaaaagtaaatgggatacggatatattcacactatcattgatatagctttatttactagtaccagttcttaagcaaattaaaaagtcgtggcttataatgaagtgcaccccaattgttagacacagtctaacaattggaggtgcattttttatgggctaccggggctaccggggctaccggggctaccggggctaccggggctaccggggctaccggggctaccggggctaccggggctaccggggctaccggttccactggacctactggcttcactggctccactgggcctaccggggcggctagtgtaggattaacaaactatctatatgtttttgatactactaaccaatcaattgcagtaggaagtagtgttacttttaacacaaatggacctataacaggaactgcccttagccacatcacaggtactggaaatattataattaatacactaggaacatatgtagcagagtttcaattacaagcttctcgcgaaaaccaattctccctcgaactaaatggtacaccaattccaggtgggcgttttggtacggggtcaccacattcaataaatcaaggtactgctgcttttaccgtaacagttgttccttcaacattgactttaataaataacacctcttcagcaggtactatcactctctcaaatagtgatggtggctctttaacaaatgtatctgcaagtataagtatttttcaggtcggataattaatttggttagaaaagtaattcataaagtttacaaataaaaaaatgaggcttctcttttctagagaaacctcattttttttattaaattttaaactgactcgtatacagatcaaaataaaaccctctatcttccataagagactcatgattccctctttctaaaattcttccatcctttataacaaggatttgatctgctttttcaattgttttaagtcggtgagcgattacaaaacttgtgcgacctctcattaaattatttagtcctgcttgtatttgtaattctgttcttgtgtcaatattagatgtcgcttcatcgagaattaatatatctgcatctgctaaaattgctcgtgcaatcgcaagaagttgtttttgtccttgacttaaattcgatccttctgaagcaatttctgtttcatattgatttggcaaatgcttaataaaagaatgtgcagatgctgccttagctgcagtgataacttcttcatcagtagcatctaagcgtccataacggatattatccataatcgaaccagcaaataaatacgtatcctgtaaaactactcctattttacttcgtaaagaattaatatcataatcttttatatcttttccatcaatatgaatttgtccttgctgtatatcgtaaaagcgagttaacaaattaatgattgttgttttccctgatccagtcgggccaactaaagcaattgtctctcctggctgcgctttaagactcacttcttttaaaatcgttttattctctgcatagccaaatgaaacattctcaagtgcaacatgcccttgtaaattttgtacaacaaatgcgtcttttttattttgaatttctggtacctcatccataatctcaaaaacacgttctccaccagcaactgccgcttgaattgtattcattaaagtcgcaaattgacttaacggtcttgagaattgacgagaataattaataaaagccgcaataacacccactgttgtcattccgtttaagaccataactgatccagtcccaatgacaagccccatacctaagttattaataaagttcatacttggaaaaataaaagctgaaaatgtatcagccttcgtagctgaaactcttagctgttcattaattttattgaaattttgtacagtttctttttcttttccatacaacgtcgtaacatccgcacctgtaattgcttcctcaataaatccatttaattcacctaaatctttttgacgcttcgcaaagtttttaccactatatgcaactagtttttttgtaacgtaaaacataataggtactgtaattaaagttacaattgctaaaatccaatttaaggcgaacatcgcaatcgttacacctataaaagttagcgctgatgaaataatttgtacaacactttgtgtcaaagcttggttcaaattatctatatcatttgtcacacggctcattaaatcaccttgagaacgcacatcaaagaaccgtaaagaaagcgtttggattttctcaaaaatatcttgtcgtattttttgaattgtttttaatgcaacgttaatcatgacaaatgtttgtaaccatgttaaaagtacagttacaccgtaaatcgcgataagtaacatacacattcttgctgtaccacttaaatctttcggtacaatatattgatctataatgactcccataaaatagggacctaataatccaagtaaagtagtaacaacgactagaaatataacaaacattagagcagctttttgatagcccatatagttccatatccgcattacagttccttgggcatttttagcttttcccatcttcggtgtgtttcgtccacctttattagcaaattgcccttgaaaattacgcatgttcttccccaccttctttatgcaaattaccaccttgggaaagataaatttcctgataaacctcacttcgttctaacaattgttcatgtgtaccattgccaactaattcaccattatctaatacaagtattttatccgcatccattatggaagaaattttggacgcgattaataatgtcgttgtgcctttatattttgtttttaaagctgtttgaatagtagcctctgattttgcatcaactgctgatgtagaatcatctaatatgagaatcggtggttttctcacaagtgcccttgcaattgatacacgttgtttttgtccacctgatagatttgtcgcaccttgtgttaaattatatcgataagattcttccagcttattgataaactcagtcgcacaagctgatgcagctgctacttccagctcatcatgtgttgcattttctttaccataacgtaaattctcttctatactacctgagaacaacaaagccttctgaggtacaaaccctattgaagcacggagtttttgcaaatcatatgttttaacatctattccatctatacatatttcaccttgatccacatcatatagacgtggtaacagtttcgctaaggtagatttaccacttccagttgatccaataatccctactttttcacctttttgtatgctaaacgaaatatcttttaaaacgtattcattatttttcgtatagctataactaacatttttaaattcgatattcccctcgattttctcaggttcgattgcattagctgcgcttataatatcaacctcggtatttaacacttgctgtacacgatccgcagatggaaaagctcgcgcaatttgaataaataccatgctaatcgacataagtgacattaaaatgatattcaagtaattaataaatgccaaaatcgctcctacttgaagcgttccattgaatactttttctccaccaatccataatgttgcgacaatcccgccacttacaactagcataatgattggcatcattaaagaaataagttgcacagctcgaatatttatcttcgttaaatttgtatttacacttccgaattgagcgatttcatatttttgtcttacatacgcttttataacacgtacaccagataaattttcttgtaactttgtattcactttgtccaatgcctcttgcacctttttaaatgtaccacttgctttacttgcaattaaaataatcgcaagtaataaaatcggaacaactacaagtaatattggaaataaccctcgcgctgttacaaaaacaataattatacttcccataaataacagtggaccacgaacgagaacacgtaatgtcatcgtcattgccgattgaatggaagtgatatcattcgtcacgatcgttaataatttacctgttccaaatgaatcacgattattactagaaaatgtttctattttcgcaaacacatcttttcgtatgtctgtagcgaaattaacagctgcttttgtagaatacatcatacacccaagccctccaactaaaccgagtgctgctgctcctatcataagaagccccatttttattacataatttaaatcccgatttgcaatcccaacatcaatgatatgttgcataatagtcggttgaattaagtccatcgcaacctcaagtaccataaatagcggtccaataatagcgaagaacatgtatggttttaaatactgtaataacttacgaaatgatttcatacataatctccttttcccatgaaattaccactgaataattcatatccctccttatttaattgatattttttgtaatttcttcattacttttattatattatgcaaattaatatttaacattattaaatgataagtattaatgactttctggtcaataaatgtgctttatattatgtaaatacaaaaaccgcattcttaatgaaaagaatacggttttttcatctatatttcttcaattgtaaaatttaaaaactcagtctcaaatcccttatttttagaaggactacacgtgtaaaaacctattttaataggctcattccctatatcctccattaaatgagcgattcttatttgttcccattgatggctctttttcacatatattgtataatcaccgcgttttcgaataattcgaaaacgaagttgttgcttagctgcttcagttggataatcttgcgttgaccagtcagaatatccattattcgttacgacagctcctaaatgagaagggccatctggaatatactctaatgaagttttcaaccaacacttttccgaaatcataacaaaaagacctgcttgatcgtattttgaatttggattcatacacaattgtacttcagcttgaaagtctgtcatcatttcattataaaatacatgaccattcatgacttcaaaaccataatgtgttttaagccaaaaatctgtttctgctttcgaacggacaataaacgcctgcttgtcattaattttataatattcagggacattcattatagtgagctgctcaacatgtttaggtatatatgatatattcatagttcctccataataaaacctttatacaaatatttaaaactccgctaatactgggaatttataacctttaaaatctaactctttatcacttcgaaccattaaatacttgctagactgtaattctgtaaactgtacatcctcaacccctaattgatccggtgaaaaataaaattcgatttccgtaaacctttcattgatttctccacataattcatctaaaaccggaagtactggcgcaaatactccaaataatttcaacttttcattgtctacttcataaacgattaaagcatctagtttctctgaataatacaatttctcattccattccgaatcatacatattcaaataaaatgaaggatggaagtttaaagttgaaaaactatttgaaagtctttggctactatcaatcgtttcatgtattaactgtctattctctatattatagaaatctaactttttaagtagtgaatggttattattaatatttttatcatatggtatagtcatcaaatattcctgcacaactttaaatccaaatgctgtatatagttcaggtttttccgtaaacaataatgcacattcacatttcttatcaatttcttctatcattttactcattaattgtgtcattagcccttgtctacggaaattagggtgtgtcattactgattgaatacccgccgcatttattttttcaccattaattaataatgggagtgaaaatgccgcaacatttgcaatcactttatcttcttgtaaaaatgataaagctttatatgtatcatcccaatatcctttatccgaaaaatcattcaatgtttgagttgtaattccaaacacttcttcaaataaaggaaataactgctctcttttcggttcttctattagaagacttgccaatttttcaacattccccatgttgtacctccaaatgttaaattccattaaattagatatacttatatgacctactcttaaaaatagaggtcttaccaatcaatatactatcataaaacataaaaaaaaagtctaattaattttatgtttcgactatttgaaaataagtcgaataaaaaaatattaagattttcggatattaattagtttattttataaaaatagcgctttctaattagcttttactaatagaaatacactatttataataaaatatttttattcttttatcccttcaagtctttccttcgtattaatttcttctccacttatacgcttttcaaaagactttctccaactatttgaaagtgcatttacttctaatatcctttttaccccttcaatattttgtttttccttatgcataatacggttagcgaatgctactgaaacaccttttggatcagactgtagtctttttaaggtgtcgactgatgatacccatccttcttttaatacacgaaaataaaatcctgtatatcctgtttcttgaaaatatagtggtaactttggaatattatatttttttgctaatttaaaacaaggttgccttggttgtgttacctgtacgattgcctgtcctagctcaaatgtatcaccaatacaaacatcctcttcgctcataccactaactgttatattttctccgaaagccccatatacaagatcttgattcaattctttttcccagtatggatagtgatcaccagtataaacacaaactgctttatctactcctccatgatgaattaagtcagcttgtccatccccattaaattttacaaaggataaatataccggttcctttacttgtttcttatttatgcctgtatgaactacctttccaccgtatgtaacctcttttggtaatcctatatttaaagataataattgatattcattagccattctatttcctcctttaaaggtgttacatgtattttctctcaattaatttttacaaccctctctgctatataaagatgattataaaacctttaaaatcattgttcaattcaattatttatataataatgataggtataacctattattatacttgaggtgattccaatcgaattacgacaacttgaatactttttagctgtttcaaaagaattacatttcacaaaagcagctgagaaattaaatatttcacagccttctctaagtcaacaaatacgtgcattagagcatgaagtaggaatgccacttttcgatcgaattggtaaaaaaatatctttaactgaagcagggaagattttattatcacatagtaaaaccatttttcatgaagtcgaacaagctcgttcagctattcaagacctaaacggattacagcaaggttccttaacaataggggctttgttaaccgtcctaaattatttactaccactaactattttaaatttcaataatttatatcccaatatagagctttctgtattagggcttcgcacaggagatattcgtgaaaaattattacgaaacgaactagatattggaattacatttctcccggtgcaagataaagagattatctctatccctctatacaaaagcgatcttacattagtcgtgccaactggtcatcgattagctgaacgtaatcatgtatctattgctgaattacagaactaccctttaattcttttacctaaaaatttctttttaaccgaactaattacatctcattgtcaaaaattcaactttaaaccaagaccaattttagaaattagcacgatggaatctttaatccaaatggtttccaaaggaatgggaattacagtgttacccaaaccatatatagactttttacaaaataaaaacattcaagctattaaaatagaaaaccctactccaacaattgaaatagggctaatttatagaaaagataaatatatgtgtgctgcaactcgagaatttattgagcaactaaaaagtacagtacgttctttccaaaactaaacaaaagagattatcctatgaaaccgtttcacaacgatctagtagaataatctcttttcaaaacaaagtaaacattatattaaactcttatagattttaatgtacctttttagatattggaatatatttagtaaaatatgcaccaactagcaataatacaattgaaaataaccaagtaaaagcaccgccaaagtgaaaccaatatgcaaacatatttaaaattgcgagtgaaaagaagcaaatagaagttaacgcacttttcaatccttttatcccagatttttttctcttttgataagcaatatacatcgcaataacaagaaaaaagataagaacaaatggtaacataacttttagcattggtaatccctccagtgtaaatgcactctcttcattatcatcttatctcatttatcttttaggcatcaattcattcttatcttccctccaaaagtcagtataagttttatttttaaagttcacgttcacctcagaaaacggcatacttcctccaactttcaatgagtaccagtcgtttaaaagtggtgatccgaaacaaatcttcattgtacgatcatgtaaatcgaataatacagaatgtaaagttccaaaccattcttcatagttatgtacagtcagtccatcaggatattcttcttctactaacttttttaaagactctatgctcacttgttcatatccatttaaatgctcatgtaaaacatgatatctctttgtagattgttctaatttcctattatttaatttctgaattgatgaactaactgcatggtttgttgatacaataaaagcttggttgtcaccatcaatcgttgttgtggatttatgaccgtcaaatatttcaatatgtgctgcgtttaaaggatcagctactattaaattaatattactagcaattggtatttcttctattagtgatttagcttcctgcacatttttacatttctccagcaacaatcgaattaccgcaaaacactgtaaaccatttaccattggctttcttaaacctgcaatgtttcctactggttgaccacatgctgaaaatgtaacagataatccatgttcgttaaccccttctgttcgaccaaaatattgagtagaaaagccactatgtgcatacgcaccttcaacatacgtcgagcaaaaacgcatatcatctattactggtgacaaatcataatttcttaatacataagtgtgagttgaatctgtctttttaggtaatactgcacaatgactacaacctgctttcaatagtgtttgatagtaatacatcatattttttgaaggaatttttaacacttcacaaaaaccttcaatttcttcattaattccagaacaatattgatttaatatatttctagattctgtccaatggttatgcgatattaagttttcttgctctataaattgcggaataagataagaatgttgtttcacaaattcaccttgttgcttaccaatttcataatgacttcctttgagcgatgaaaaatacccctttacttgatacatcaaattccccctcttattaaacatatccatatcgtaccaaatgaatcccattcattcttgatgttttttactaccttaactctatgccactttaaaacctccactaataattatttactaaataattatttttttgttaatatcgctatagaagctttacttcaaaataaaatagtttaatatcaaatgagcaaaatactatattgaacttactcgtaagcaatcatctaatttttgagattaagaaacttatttatcaaagcaaaaggaggatttatgtatgagcaattgcaaaccaattgatgaattaactattgaagacctaaaacaaaaccccatttgggaatggacaatagatgaagaggaaaacgaagaacatgacgaaacatgggtaaaaccagcagcaactactaattttacagaggagctaaacggttcaatcgtactaggcgaactattcttacataatggtgaaaaattccctatgatgtgtgaaattgacattgaaaataacgagacagtaattcgttctgttgtttattataacgaagcagaaaatgagtatattgctatagaagatattgtgaaaacggtcgaaatgccgttatcgattattattaacctaacaattcatgcagaatccaaaaccttacgcttcactgcacataaagtagatatttataaaaattcaataacgactaatttaaattaaagttgggcgaaataaagaaaacaattattaaataaagtgaagctttaatcagtgggggtcttactgcccagcaaatagcgggataaaaaccggaaaatgattatcgattccccggtttttcaaactagattaaagtattcccttttctactaaagtctctgcgatttgaactgaattccaagccgcaccttttaataggttatcagaaacaatccagaggtggaatccgtttggcatatcaggatctttacgtattcttccgacaaatgtatctattttcccttctgcatataatggcattggatacagctgtttactagggttatcctgcaaaataacacctggtgcatccattaatacttccttaatttccgtaacggttgcttctttttccagttctatataaactgattctgaatgccctgatacaactggaacacgtacacaagtagctgccattttcaggttttcatcttctaatattttcttcgtttcttgaatcatttttacttcttcaaaagtaaaatcattgtctgtaaatatatctacttgaggcagtacattaaacgctattgggtaatgttttttatcttttttcgccggtaatatattacttttcacttcttcaccagcaagcatagacttagcctgctcttgtaattcatgaatcgcatgaatgccagaacccgatacggcttgatatgttgaaacgataattctttctaaaccgaatgattttcgaatcggctgaagtgctgttaccatctgtaatgctgaacaatttggaactgcaatgatacctttatgctgctttaaagtatgcgcattcacttccggaacaacgagcggtacaccttgtgccattcggtactcacttgtgttatcaattacaatcgcaccactagaaactgcatgagttacaaattgtctagatacttctcccccagcgctaaaaaaggcaatatctacaccttcaaagctagttgtttttgcctcttttataattatctctcgtcctttgaatcttactttcttaccagcggatcgttttgacgaaagcaatgtgacttcaactatattaaacttcatttcattctctaacagttcaataattttttgccctaccgcacctgtagccccaacaacagctacatgatagcccttttttttcatcttttctcctccaatatcacctgtatgaatatttctacaatttcattttatacagaatttaatcatttggaaaattaaaatgcatgatataatcattcacaaatcatgataataaaagagggattgcttatggaaatgagacatgttaaaacattttgcgccattgtgaagtatggtaatttttctaaggctgcgcatgcgctaggttatgcgcaatctactgttacagcacatatgaaagctttagagaacgatttacatattcctcttttcgatcggttagggaaaaaagtgctacttacaaaagcaggtcatcaatttcatccttatgcattagaattactttcaatatatgaaaaagcgcaagaaatcccccaaaatacagattatttagaaggtacattaagtattacatctaatgaatcattagcggtataccgattaccacaattattacgtacttacaaacagaaaaatccgaaagtaaatatcgtacttgaaacaaacacaaatgaacaagcattacaaaaattacgtgaaggagaaacagacgttatcttcataattggagaaagtatagaacataatgattttattacgcgtacttttagtaatgaaatatttggatggattttaccagatcattccgctgcacatacaaatccattccagttattacaggacacccagttcatttttacagaacaaagctgcggctataggccaatggtagatcgttttttatgtcaaagtggaaatattccagctaaaacatttgaaacttccaatgttgaagtcattaaacaatccgttatgtgtgagttaggcatttcaattcttccttatatcgttgtacaagaaagttgccaaaaaggacaactatgttttcaacctatcgaaactccaacagttattcaaagttatgtaatctatcataaatctagatggatttccccggtattacaatcgttcctttccttacttgaacgagactaaaatattaagacgtacatagaaaaagagtaattgcctaataagcaattactctctttcattaattagtatactatttattagtctgtcccccacctgcaattaatttactacctgaatatgtacctttgttcataaacacttgattaattaattctttttgctcagcttccgacattactccttttccttctcctaaattcccactttgtaatttccaaatcttattatgatccccatcaaccttttcatattttccttgtttccatcgttctaaaatttctacatatgtacttccctgtacaagatcattactctttacaatatcaattaagctttcaatccgctcttgtgtaataaaaatatagccccacttttgatcagctttcgctttttgatgtgccatttcatgtaatgctgtctgtatattctcatctgtccatttaaaatttttattaaaaccactattcggcaatgaataatttccattttctaaaagctttgcatcttctgcttttacgttactatcagctaatacttctactgctggagcagctggtgatgcctttttcgcagctggtttactattatttaaataatgcagcataccatatgttaaacctactccaattaccgccataccagctataacacctattattttcaaaaatgttttcatctcgcttgtttcctcccaaatatctccgttctgactatctaattatttcttatataaaaactgttacttcattcaaaatatcgcatcccatcccctatcatattatttatatatacttcctcatattgtatttctttttctttaaaattgaaagattattctgttaaataatgaaaatattctacaaatttttcctttatatttataaagaaacaaaaaacaacgagggcgttctacaacactcgttgtttttactttatgcacgattttcttttaaccacttcgtaatagcatctaacttcgaaacatcaaaacgtctttcttcacacacgttcaaattttgtgagtttctcactatttctaattcattatttcttacactttttgcctcaattaatttacaatacccatctgtaacagtatttaaattttcataataacgctgaaacgattttgatatatgtaaatgtttttcaaagtttcttcttcttttcgtctcatcagatactttccgctttctaagttcttcatcgttcgtatataaataaaaatattgatccggaaagccaatttccctatttatcatcttttctttataaaaattttctattaaagataatggctgattaaatatatcaaaatgaaaacaccaattataactaagtggctgataaatatcgccatcgagtattactaattcatattgctttgacttctgaacagctatattccagcgctcaacttgtttttcaaaataccatgttctatgttcattttttggcctttcaaataaagaattcacttcaggtattatataagcaccataattcttttctaattcacggcacgtggtacttttaccaacagcgcttgctccctcaaatgctattatccccatagtttctccctctttcattaactaaaatttcgttgtttcgcttttcttccccataactttctccataaaacaattgaagcgacagtgagcatgattgttgtaatgatactaccttcaattccgaacgcgcctccatgcaatgtttctggtccatttgttatagacttaaaaattggagtagaatatacagttgtgccactaactgcaaaaccatatacattatattgagcccagttccaaattgagtgccatgcacatattccccacagaccgtcttctttcaatacatataaagctgcgaaaacacccactaatattatattcgatatagataatattgtaattcctggattaagtagatgaagaaatccaaataaaaatgaagttacaattattccaacccatatacgacttctaacagaaagaaccgggaataaccaacctcgtacaataatttcttccgttgccccttgtattaaaaatgcaactagagatcctgctattcctactatcactgttgaggtaatatgttgtacttgcaatttcacactccccattaataatagtagaataactggcgttgaaataaataaaaaccctattaacgcaccttttaaatactttctcatccatttctctttccaaaagccaatggatgaaaaaggtcttttttctacaaaacgaacccatataaataaaataaatatagctccgccaaacgttaacaccattctaacattgtcataaatacctttcatgaatatcgtttcagctttcggtaaaaataacataaataacataaaaagttcgcctaaagtcaaaaatataatggctaatattacagcaaagactggatggaccttttttctccctgcttttgctgcttcaattattataaatgaattatttttcactttcttttctccttttataatatttaactaccaacagtaaccaaccatattttaccacgaaaaatatattattaatatttactctaagtttttcttacatgattttgcataaatcccaattaggaataatatataaataaaagaggtgcctttgtgcctttactattatcacccagattactcagtggtattaccagcacttgctatttcccaccatttgttgtaagatagtaattaaggtcaatttaacactatattttctttgcatattatcaagtatcaatcagggacagtttgtactccttatgggtttttgataatatgtgaaattttattttcattcaaataaggccgatcatattgtaatttttctacttttaggaggcattaccatgacattaacaggtaaagtaaaatggtttaacagcgaaaaaggtttcggtttcatcgaagttgcagacggtaacgatgtattcgttcacttctcagctatcactggcgacggcttcaagtctcttgacgaaggtcaagaagttagctttgaagttgaagaaggtaaccgcggacctcaagctaaaaacgttgtaaagctataattcaaacaataaaaaggttgttaccagcaaggttaacaacctttttaatatataactaaaattttttacataaaaggagtggttacatgtatcgcaatcgaaagaacgatgtagcagaagtaccaccagaacaaacccctgtttgggaatgtgaatcagaggattgtttaggatggatgagaaagaacttttcatttgaagaagagcctaaatgccctttatgtaaaagtagcatgaaaagcggagaacgtttattacctaaattaggttaatttataataaaaaaaacctcttttaattaagaggttttttttattataaatttatgtcctcaacatcagttcgcactatagaatacaacaatgcatcgtgttgcttatttccttgatgaatatatccgcgcaatagcccttccttttggaagccaattttagataacattctacaagaagtaacattttcaggatatgtaatagctccaattctaaacaaacctaaatctttaaatccataattaataatttctccagctgcttctgaagcataaccatttccccaatagcgaggatgcagatcatatccaatctcagatcgtttactccataattgtaaattgtttagtccaattgttcctattaaaacgttcgtttcttttaacacaattccccatcgtattgcctttttctcaaagtaattttttgaaaaagattcgatcatacgtgaagcttgtccaaactccgtaaaagaattcataccgtagtaacacgtcacttcatccaatgaaaagatttcatatattttttgacaataagattgttctatttcaactaaacgtaagcgttctgtttctagtataggaaatgccataggatcactcctttctctctactcattcattatatcagaaaaaatatgtataattagtaaagtccttattgttccataaatcaaacatttctaatggcacattctctcttaattctatatacacgaattagataccttctgattgcacctcaaacatgacgctataatttccataaatcgaattttaaattatcaagaactgtaaagaaattgtttcttcattttctccttctaaacaacaaacctaccccttacatttatggtaaaatatagttaatatattattttattgtggaggtgaagatttcctatgtatatattcatcggcttatccctcttactcatattacttatttttttattcgcaaaaaaattcacaccaaactcattcatgatgactagctttaaaggtaatagctttaggacattttcaatcggtattttaatcgctgccatactctcactttcatatggaacttatcatgcggtaacatatcaacctagttatttagatattaaattaaaaaatcaaaactatactgttttcggtaatataggcgaattcggttatttctccgaagaattattaaaaaaagatacagaagtacaactatatttcgtctcttggaaaacaatacagttaaaaaatccggtaatacttatagaatatccttcaggaaaacaagaaacatggaagccaaatatcgtatcaataccggtaaataaattacaagaaaaacatgatataaaagatatttatcaactatcaccgtattcatttaaagagtctggagaaataacattaacattaaaagaaaacaatataaaaaacaatacaatttccattcaaataaaataaataaaaactgttcctccattttgctgaaggaacagcttttatttattctacagtattatttatttaatgtagccattatttcattggctatattttttccatttccaatacacgcaccaattccgacaccataatatgaggcaccagctaaatatacatttggataaagattcgtcattttttcttgcaatgcttgaaccgcttgattatgttctaaatgatatttcggcattaaatctttccaatttgtaacttcgactacttctggttcacctttaattccgagactcttttcaatatcatataaagctactcgtactaattcttcttcactataatttttgattgtttcatataccggattggtgctcttataaaacattcttactaataatttttgtttacccgatgtatgtttccactttcgacttgtccatgtacaagcatcacaatgtaaatcactgttttccgttacaataaaccctgtgccgtcagctggtagttgttcatctagtatgtcaaatcctaagtaaatacttataagagatgagtttttaaatgtattaaactgctcatttaactcattagactgtaataaagtttgtgctatatcatgcggagctgctaaaacaacataatcagcttgtattgtttcatgatttacaaaagaaatctcatatcgatcttcttgtttacttacagccgtcgttatagcacctttttttacgacagtttcagtgagcacttcttctaagcgattaattatcgtagatagtccacctttaaatgatacgaattttttatttcctgctgattgaaattgttttttattctcttcaaaacctttaataatacttccatacttatttttataatccagtaaatacggtaatgtagatgccattgtaagctcattcaatttaccagaatatacgcctgaaagtacaggagcaatttgtctttccactaactctttccctaagaaactttctaaaaatagagcaagtgatgtatctttcgtaaactctttatttttcgttatgaaatcttttaaagctacgattttccctttcgttgagactagcgtactgctaaacaaagactgggcgctcatcggtatcccaaatatagtatcagaaggaatcggatgtaacatgttttcagaatatatgtaagaaatacccgtttcattatataccatttcatcttctaaatttaaatcttttacaagtggcataacatattcattacgagcaacgattgaatccgctcctgactccataatgaaatccttttcttccacactatggattttaccacctaaatactctgctttctcaataagaattaaatttaaatcgatattataatccttttttaatttttctaaataaaacatagtagaaagtcccgttatacctccaccgataacaacaactgttttcatatgtgctgcgctcctaaccgatacaattaataattcctttttattataaccaaaagtccttatattcgactagcaagttgcgcattctgtaaaaaattagacaatatatttgaatatattttcaaattacctaataaaaaagaactataacatatacaaaccacgtcatagttctctttattttaaaaacataaagtaattgattaatttgtctagttcttgactcaatgccaatactttttcatgttgaattccataatccgatactaaatataaaagttcttctttttttatttcaattactttttccaatttcgctagttccatgtcgttttacatctctccaaaaataaaatgtatgtatttcagtatagcctacttacataattagtaaaagtaaaatacgcatgtaaaatcttacatatttgaaaaaataatatactactaacaaaaaaagaaactagattaagcttccttttacagattattgacgttcattaagaatgaataacataccggaatttttctaatgttatatctttataatttggagctctctttatatgattaaaataactagcaattgcagctgctccaaaatgcgcatgccaaatatcatttgtttcttttttacattgagaaataattgaaaggccgccttttaaaatacttttgttttccattttctttctcctctagttaaaatcactatattttcatcctaaagatggtgtcagtacaaataaaatgtgattcgattcatcacttttattcaaaaatcgatgcttcacatttggtggaatacgtacaacatcgccttcttctaaaaaatattcttttccctccaattctacatacacttcccctttcataataacagcaatctcttccttatcttcatgggaataatgactttctgttgtgtttgcttgtttatttaaatccatcattaacatttcaatacgtgctttcataaaatcaggtgttaatacatcatatacaatgtgatcattgttttcccgatatactttttttcgatcttttttcttagaaatgagcgaatctgtatcgatatcattaataaaaagtgtaaacagcggtacatttaatgcttttgcaattaactccaaaacatttaaagaaggattagcatgtcctctttcaatttggctaattagtgacgtactaatccctgcataatcagcgaattcacgaattgtcatattatttttcttacgataacttaatactgtttgtccaagcctatcatgtatcatagtaaaacttcctttcgtccatcataatgcatatttcattgtctttgtgctgacatactaaacaaaggcaaataatcctttcctattatctccgggacttatatacttacttttgtacattatatcgcattaagtttattataataaacattctatcggagggacaaactttgaaatcacctattctttcatatttcatcttattttttggtgtattcgccttatcaacttcagcaatttttgtaaaattggcagatgctcctgcgacaatcattgctttttaccgattattctttgccacactgatcctgttaccgttattactatttaataaaaatagtcgaaatgagctaaaaactttaacgaaaaaacaatggacattcggattcacatctgggctatttttagctgcacattatgtactatggtttgaatcattacaatatacttctgtagcaagctctacagttatcgtaacgttacaacctttgttctcaatgattggtggttattttttatttaaggagagatttacgaaaggagcggttattggttgcctcatcgctatttcaggtagtatcatcattggctggcaagatttcaaaattagtggagaagctttatatggagatattttagcatttatcgctgccggtatcattactgcttattttttcattagccaacacgttcgtaaagatttgtcacttataccatattcggtaattagttatggaagtagtgctggctttcttagcatatttgctttcatgcaacaagaatctttcatccattactctacacaaacttggttgtgctttattggattagctttcattgctacaattttaggacaaaccatttttaattggttattaaaatggatgagtgctactgtaatttcaatgagtattttaggtgaaacaattggcacttgtatgctagcgtactttatattacatgagactatttctttacaacaaggactaggaattaccgttatttttattggtttagtattatttttattacagccaaattctaatgaaaaagcatgacagtatactgtcatgcttttaactattcattatgtacaattaaaccattcggtctaaaacgactcatcataatttcattaataaattttccgtgagctttcaaattccctatctttactccctcttctacaaatccaaatttttcatataaagcttttgcttttggattcgtttctaacacacctagttctactctctctaacattaaccaattatcagccagatcaagcatcttcataagaagtgctttcccaattcctttattatgatattcactgtctaccccaatgaataaatcgcctgaatgagatcttcggcccggactttgtgttaaacctacaaatccaacaacttctccatcatattctgcaacaaattcaaattgatttggtgctaaatttcgaattctattttccatagcttctacacgcatgctaggtaagaaaaccatatacggtaaaacgtcatcctgtatacatatacgatgaattgctctagcatcttgtatttctactgctctaacgttgatccccatctttctctcctccatataaataacaatatatttgtttgtgtgtaattctagaaacgtgtatgaatgaccttctcactcgtatttctttatgtcatttttacataattatttcgatataatacttaatttccaaaaagattaacaactatatggatttggttaacttttcgcctcgttatataaattaagcaaattttcaattggaataccatttagtttcatgccgactatattacaattttctatttcaatatttttcagattactattacttatagtgctgccttccaaatcacatttatcgaatacaataggttccttctcatctccgagacttgtatttttaaattgcactccacctaaagtcaccaaattaaatttactgccagaaagatttaaatctgcatatgatgaccatctaaaatttatatttctaaactttgattgacttacattacaattactcatattcatatttattatattgctaccaacaaatgaactgttttttaaattcacttgataataccctgtattcgctaaattacagttttcgtattgactatttttcatatctttatttgtaactacactctctttgtttgagcttgtttttattcttttcacgtaacaatactcatcttccgattcaaaaatcatttggtagcccatctttttataaaagtgatgattattaatttgtctactagatgtttcgagatcccaaatctttatgtttggatattccttttctattaatttcataacatgtgatccaattccttttccttgataaacaggatctacaaaaatacgatcaattcgaccgtacgacttaccagaaatcgtaactattatccctccaattatttctttatccattacaactttgaaagaatccaattcttcaatggaatattccatcatttcaactgaagagtaccctggcggttgaatgttataatcaatgacatcatcttggccgtatagccattgttttgcttctgcatcaaatgttcttttcattatttctgttaatttctcagcatctaaaattgtagctttttctatagatattctcgtcattttcgttttccccttcattattacaaaccaaccattttgtgaatgccataattatcaattcacttttatttttaatacttttcccattattacatatggaacatcatttttacttggatgaaatggctctaaaacatttacccaatctaatctttcatataacgaacgtgctttttcattgtttatttgtgttgttaaaacactcgttctatttgaaagcccttctagtaattcattatgtaatttcgttccaagacctttattttgatattgtgggtgaactgctaactctacaaattcaaaacaatcttgcaaccattcgtctacttgctctagatgtaacgcttctctcattaattgattatagtactgtccctcgattgagcgataaccataagtaaagccaactacttcattttcatcatttattgctactatacctttaaaacctgtatattctatatgcctattcattcgctcgatcatttcattgaaatttattttctcaaatactttacaatacaattttgccatatcctcaattaagatttcatctttttcaatgcttacgaatttcactttattcccccctgttaaacatttacatacttaaaattttaaaaacaaagaaaattaatactaatcactctctttactattaaactacaaatcatcctatattttccacaattacttagtattaatgaataaaagaagagaccatgtaatatcaacatggtctcttcttttattcattttcaattttattccgctatttgccgggcagtaagacccccatctcaaaattcagcgaaagcaaagaagttaggtgggggtcgggctaataatcagcgggggctgacaccccactgattaaagtttcactttatataattaaaaattagatattacttaagccaatcgttgcaagtgttacttaactgctgtaaatcttctataaattgactcgcatcatatccatcacaaaccgaatgatgtacttgcaatgaaactggtagcataaccttatttccttcgttaaaatatttcccacaagttataattggcaatagaaaattttcatcattattaatattaagattaaatccagtaaaactagtccaaggtatgctagaaatcggaaatacattaggaggaatattttctttcgtgaaaagaccatgaacactagcatagcatctcatatcgtcttcataatttttatagaaagtgcggaaatcacttgaataatccgtccatatacttgaaaaagacttatcatctttatgaaagattgtataactcggtatcatttcctcccaatagcctaaaactccttcatcgttaaaacatgttcgaaattttttatgattatttactactctagaaattaaatatataaaaacgggataaaattttattcccttttgatatactttctctaataacatcgtgatatcaacattaacagtcatactaaatgtacatttcaactttaaataatgctcaaaatactgctctctattccaatcttctctatcaattacatgaaacttcattctaatagcctcctaaaattttctttttattttagaaggctatttcccttgcttcaccataattgttcactcctaacagtttacatttcaccctaattatttatttaattatataacatatgtaagaatcaattcacatatttcttgaaatccatccacatactatagataaatcaaatgaaatttggaggatacatacatgaataacaaaaatatgaataaaaaagaaaatgttactgaaaatactacatctattcaaaataataatactgcaaaccttactattgaagaacaagcaatgaacggcttatacggaatgcccgaaacaacaattgaagatgctgatcacgctgcagctgatgatttgacttcaaaaaattaattaactacattgaaaaaagccaaggaaaatacccttggcttttttaactatgcatccaccttttgtatttcttcactctttcttgaaagtttacctggccaaaaagcaaatcggcctaacacaactgtaattgcgggtacaagtaacggtcttacgataaacgtatctagtaatacgccaattgcagttacaataccaaattgaactaatacttgaattggaagtgtacctaacactgcaaaagttcctgctaaaattaaacctgccgatgtaataacactacctgtttgtattacaccattttttactgcatccaagtgattttgtgtctttctgtttttccatatttctgaaaccataaagatattataatcttcacctaaagcaactaaaaatacgaatgcgtacaacggtatcgcaccttgaatggccggcgctcccataccgtaatgaagcaatatccatcctgctcctaacgctgagaagaatgataaaacgacagttacaattaaataaatcatcgcaacaaccgatcgtaagtagacaagtaatagtaaagcgataatgctaatcattactggaataattactgattcatcacgttcagtaatttgctttgtatcatataatgaagctgtttctccaccaatccacaattgctcttcagcattactaatcccagcatcttttaatactttttctacattacttttcaatttaggaatttgatctaacgcttcaattgagtatggattttccgctaaagaaacttcatacatttgtatttgcttattttcttttccctcttttggctctttcactgtatttatgaaagaaaatttctctagttcttgtttaataggaagctcttttcctttcgtatcaacaaccacttttactggtgctagttcaccagctgagaaatgatcactaattaacgtaaacccttcacgagaaggcatatcctttggaaacgattctaataagtcatatgtgtattgaatacgtggtacgaacgaagccaatccacctaatacaaacacagttagcataattattgtccacggtcttcgtactactacatctccaagttttttactaaaggagccttttgatttttcaacttttacagccctctttttctttcttgcaaactcctcattcattgaagttgttctcggtataaacgggaaaaatgcaatcctaccgaaaattaataatagtgctggtaaaatcgttaaagccgcgattcccattataaatacagcaacactaaatggtactgcaaatcgatgaaaggcaccataatgagcaagtaataatgtccctaatccaagtacaacagttaacgcactcattattattgcaccgccagaagctttaatcgcaagttgtaatgctttatatttactttcttcttctaacaagtactctctatatctcgaaattaaaaatagacaatagtccgttccagcaccaaacaataatactgtcataattgatatcgcttgggcatctactttaatccatccgtgatcagctaaaaaaccgagtgtaggactaatgataccgtatgcaaagccaacaacaagtataggtaaaattgctaaaattggcgaacggtaaagcaaaattaataggaccaagactaataatacagtagccactaacaatttcacatctgcttgactaaataaactaactgcatccgtttgaatacctacaggcccagataatcgaacatgtaaaccagattcacttattttttgtttaaatggatcttcatccaccttactattcactatttttctaaactcttccagatttccttttaatatatccgtaccagcagatttattaaagaatactggtgtaacaaatgatgtaccatcttttgatgcactttttgataatacttgctctggaattgtatcaaatggcggtaacgttgattgttcttttaaaggactagcttttaactctttataaacgtcttgtatgagtttataatcctgtgactgtaatccaccatctctataccatactactaacaacggattccctgcattattcggaaactcttttttcataagcgcttccgcttgctgtgacatagctgtttcaggtaaattttttggattcggttctttcgtactgtttacttgtggtaacgtaaatgaaagtaataatgtaataagaacccacaccgataaagtgatccattgcatatttttccctgctacaagcctccctaacatatgtaacgggtgctttttcataaaaacccaccttccttttttcctccattattaattatatatactggtcggttaattaatcaagaatgattgaaaattatgttataattatctcaatcataaatgtcaggagcgaatgtatttggaacaaaaacaacgtcctctcggaaggccgcgtcaaaataaaaatacaaaatctacaaaagaaaccattttagaagtagcaacccgcttatttcttacacaaaattatcaagtcgtttctatggatgaggttgcaaaagtttgtggtgttacgaaagcaactgtctactattactattcaacaaaagccgatttatttaccgctactatgatcgaaatgatggtacgtatacgtgagaatatgtctcaaatactctctacaaacaaaactttagaagaaagattattagacttcgctaaagtttacttacacgcaacgatggatattgatatgaaaaattttatgaaagatgcaaaactgtcgttatctgaagaacaattgaaacaattaaaaaatgctgaagataatatgtatgaagtactagaaaaagcactcgataatgcgatgcacatcggagaaattccgaaaggaaacgctaaatttgcggctcatgctttcgtatctttattatcaattgggaattttaaagatgaaaatcacaatcctattctggcaaatatagatgaattagcacaagaaatcgtttctttttattggaatgggttaggtcattcatattaaactgatttactttaataaaagagcatatttaattttttcaaacatgctcttttataatttatttatatactaataatcagattatacttcaacgtcacttaacaaaaaactccattttaactttacaaattttgaagttgaacatttatattctccttacttaatcccccatggtaacaaactacagattcaatatgtaaatttaaatacttcttcaaagactgctttgcttccttaatatttatagttgttggggcgtgaattcctcctaacatcccattcacactatacatagagtctcctgcaataagaattttgctttgtttcaaatataaactaatatgacccggagtatgccctggagtatgaagaattagtattccaccacaatacggaagttcttgcccgtcaatcacagtatcactcacttttccttttgggcggttctctacatttccgtccttcaataaaggtaaatccccctcgatatatggcttatctagttcgtgcgcataaactttaatattacttcgacagcgctgcaacaattctggcagactacctatatgatcaatatcctgatgcgtcaaaatcacgacttttaacttatcaaatgataccccaaccttttccatctttacttgtatatcttcaatttgtcctgggaaacccgtatctattaatactgccatttcatcattccataaaagaattggatgaataacaaattcttgaaattcaagttgtaacatttctactcctttagcaatctccatacagccattctcctttatgttgaagtttgaaaatatgtacaagtaaactgaaaatataaagtgaaactttaatccgtggggttttactacccgacaaatagcaggataaagcacctctatcttataatatgttttgtcatcccaatagagaatgcttcaaaccctatagattcatagtaagattgcaatttttctacacacataagttgtggaataaccttgttttgttcacagtgctggattaatcgtttcactatttcttttccgatgccactagactgatattttggcaatacaccaactccacaaataatgcctgttatgactccatctgatatgacacgccccatccctactaacctcttatcatcaaaaacataaattgcataccaactttgcttacacattcgttctaactcgttaaccgttaatttaagagaattccatcctaaagattcgtataaggataataatccattaaaatctgtagggtgttcacttgtgtagcgtatactattttccatgtaaacactccctattctctagcttgtttatatttcataaaattccctttacacaaatctgatcgatgtaaaaataactagaacaaacttcaataagaaagatagaattccttctcaatataaaataaaaagaagttatctcacttaagataacttcttttatataagactctcattatattatcaaccaaaaattatacaactacatacgataagcacaaacaaaactaataaaccatttgagaaataacccattaaatactacccctttattaaattatgtaaaagattttatcataaaatgatttacaacttaataactgaaaaagacattgtattcattagttatatacgtttagtaatattttatattcggttatattctcgttccctaaaaccacttctcgcatcctcataattcagtccacataaattcaaaaaacagttattagtaaacattcatttactataaagagtaattttaattgatttatattgaatttagtaataaaataataactaaactcataaaggaatcaaaaacaatgaaccaaaacgaattattaaacgaatacatgaatttattattaaatatgtcaggtacttttaaattactatcggagaaatcctcagaatttacacatttagaacaacatgtagtagagtatatcgcccagcaaaaggtgcctgtaaatttaaaaatgattgctagttatttaaacatccctaaacaacaattaagtgtaacagtacgtaacttagaacaaaacggatacatcataaaaaagaaagatatggtagacaaaagagctatattaatctctctgacagaaaaagctgaaaaagtacattatgagagatggaaacaaatatataataatttcacagtaaacctcgaaaagttatctgaagaagataggcgggatttaacttatggactatataaaacaaatacaatgctctcaaaaatgttaaataacgactaaatatattgtttattactaaacggaggatgtttcatggctaaagaattagatttacaatccgtgcaaggtacgatgcttattcccttatggggaagagcatatggcagtgagaaaaataaggatattttagatgatatagaggctattcgaattattaaagaatgtaattttgacttctcaacaatagcaaatatatttggcgaatacggatgtatcacatacattacccgtgcacgaaaaattgacgatacgataaaacaatttataataaaacacccgaatgctactattgtaaacatcggttccggactagacactactttttcaagaatcgataacggtacaatacattggtacaaccttgatttgcccgatgcaatctcttttcgcaaaactttaattgaagatacgcctagaaatattagcattgctaaatcactatttgatacttcttggtttgacgatataaaatataattcaaacgacggtattctttttatatcagcaggtgtgttttattactttaaagaagaagatttaaaaaagatcgtagtcgctatgtcaaaacgtttccctggaggagaattatattttgacgctgaatcaaagttcgcactgaatctttcgaatgctactgtaaagaaatccggtaataatggtgctatgatgtatttttacgtaaacaatccaaaattaatagaaaaatggtcctctacaataaaagtattaagctgctcccctttctttaaagatatacctacaaataaagattgggacggtagtacgcgtataatgatgagaattgtaaacttaataaaaatgttgaagtttgttcatttacggttcaaaaaataataagtaaagaagagctcaatacatttatacttaggttataaatgttaatttcaataaaatcaaaggcagaaacataattgtgaagtgaaaatttaatcagtgggggctttgctcatcccccactgattattagccctcaccaatcgagcttttacggcagcccgaaccccacctaacttctttgctttcgctgaattttgaggtaggggtcttactgcccgacaaatagcgggataaaatcttgcatgcactttacgtaggagctaaaatgttgaatctcaccgatttccaaatcatgtacaccatcttgcaacattaactgattcatttatcctctctcctcatcgctcacttattactatctaaatgtataagttctgaccattcacacttttcccctttatatcctttagacactatcctcatttatatgaatagctttcttattcaaaaatagatttttaaaaattcctactcccacaattaataaacctataccaactaatttatttatttgtaatggaatgctctccattccaaataatccaaatgtatcaatgcataacgcaacaaccaattgagtaataagactaattagcaccgtatatgctggacctagactctttattgcacccattatacaaataattaacccgataccaaacagtccacttacataaaacaaataatttgcagtatacactttaatgctaatactgttttctgtaatgatataaaatagaatagagctaatgagacctatcccaaggacacatgtagttattaaccactgtcctacattttcatttacttttgcattaaaaacagattgtacgctaattaatattcctgctaatatagctaaactaaatccaatcaaaatcttcctctccctttcattgctcatatatattatctttagcgacttccttcattctagaaaaatctttaattacaataactccattactctttttaattagtttttcattataaaatctttgtaatacccgaattacgtgcctataacttacccctataaaatctgcaatactcgttactgaagttgcatccaaatcccctttatacatattcccgttactatctgttgaaattgaaagcaaataactagctacacgtacttctacaggataaagtaaattaagagcagtaaaacgagtcgatatttttaacgtgttcgcaatgttttcaagcaagaacttcataaatataggatcatgtaataacttgtttctaataaccgtattagaaatagagattgctacaacatctgaacaagcctcaacgatattatgtgctttgctattttgaattaattcaatatcaccaacaatggccaatggattgataaagcgaaggattagtttcttcccttcaggtgtaatcgtgtaaacttttactttacctttaacaacaaaatataaacgatccatttcgtcatctatattgcaaataagctcgcctttttcaaagtgatttaattgaaaataagctgtatctatttctgaaaaaatctcgagcgttttattggttttcaaataatgcgtaattaaacctgatctatcctccatattcatttctcctttcatttacatattaaatacaacaatacctataatcattattattgttcccacaatatgatatctctccatctgtatcttttttatatgaaatagtcctttcatttcaataactgttgccgttaacaattgagcaaccataagtgtgccagctgtcaatgtaactcctagtgcatatatcgccatagtttctgcacaaataatgaatccaccaaatgcacccgctgctaaatatatttttttcacactctttaaattcgttattttctcttctttctttaacaaaaatacagttgttacaataatgaatccaattaaatgggttataatactcgtcgaccatataccgatatgtgaactaagtttcgcattaaaggttccttgaagtgttataaatatccccgcaaaaacagcaaatataatacctttcaaaaaatcatctcctcatcctttatttctgacttaattaaaaaccatcatcctataatggcaaaaggacaaatgtcacatcactatgaaaacaacttggaatgaacaaaaaaacacacctcaaaaatgcggggtgtgtttatgtttattatttatatataaagttttataaatttaaattacgctacattaaaatatttctttttcataacaaactttgtaaataagaaacgtacaagcggtcccataataattaattgtaatggatatgccattatgaaatttttaataaaaatcgaaaaataaatggaaacaaatgaatctccttgtagtccaccatgtaaatacatcatagccataccgaaaaatgacataaagaacaccattccaattaccatagttgtcgccattgcaacgataatatttatttttttagatttatcaaatggcaatatgaatacaatttttttcgcacaaggtccaacgatacatatttcaattaatagtgcaataataaagccaattaatagttctaatgcaatctctttaatataaattggtcctcctgtttcattcattagtaaattgtaaaacgtcattacgataaccatcccaaggcacatcatcatgccaaattggagtttttcctttcttgttgttggcaaatttcatcatcctttctctttgagtctttgtcattatatcgacattggaaacctcttcgtaagtgaacattttgtgaacaaatttaaaacgttttcattttttcctttctactcaaattctcacttttacttatagaggttatatatatcgcaatgttgaattactaaatttaacattgcattacactattactaggaggataaccatgaatgaagcagaattttacgcatatcacatcgtaacaaggaaaaaaatgcatatcggacaaatcattctttttaacaaaaatcaacacaatactctatatcacttcttttttgaaagagaacaattaaatgctagtggtgaagatggcatacaaattttaaataaacactataaaaataacgaattacatataaataatgaaaatactaaagtagttatgagttatatggatcaaacaattagagcagttagagaaacaattgtagaaatggttagactacaagaattccctgaatacccttccaggttatcttgtttatacgcttcaaaaagctatgaagatgctttaaaatggaaaacattatttgattcttacaatcgagaagttttacagattgttaaactacgagtgattggaaattcttttgaaggtgacgggaatcttttaccgaaagaagatggaattcctttttctcaaaaaatcgaacaagctagagagtattggaaaggaaatattagaaatgatcttcctgagctactgattaatggagaaattgaagtggtggaaattattgatgacttttcctcaattcatatttaatttctaactaaatcatataggatggagattacaatgaagaaaaaagtgtacttcaatcatgatggcggcgtagatgatttaatttcattatttttattacttcaaatggaaaacattgaacttacgggggtatctgttatcccagcagactgctatttagaacccgcaatgtctgccagtcgtaaaattatcgatcgcttcggcaaaggtaatattgccgtagccgcttcaaactctcgcgggcaaaacccgtttccgaaagactggcggatgcatgcattttatgtagatgctctaccaattttaaatgagtctggaaaagttgtaacacccgtggtggcaaaacccgcgcatcatcatttaatagaaacgcttctacaaacggaaggaaaaacaactttattatttactgggcccctaactgaccttgctcgtgcattatatgaagctcccataatcgaagataaaattgaacgcctcgtttggatgggtggtacatttcttaaagctggcaatgtacatgaaccagagcatgatggaacagctgagtggaattcgttttgggatcctgaagcagtagctcgtgtatgggatgcaaaaattaaaatcgacttagtgacactagaaagtacaaaccaagttccgttaactataaacatacgtgaacagtgggcaaaagagcgaaagtatattggtatggatttccttggtcaatgctatgcaatggtccctcctctcgttcacttctcaacgaactctacttactatttatgggatgtactaactaccgcttttgtcggaaacactagccttgcaaaaactgaaacgattaatagtatcgttcatacatacggaccaagccaaggacgtacagaagaaactactgatggacgacctgtaaatgtcgtttatgatgtaaaacatgatgttttctttgaatatattactgaattagcaaagaaagctgctacttaaaacctcaataacacgaaaaaatttattaagaatgatatactttaattaatataacatgaggtgataagatggattatgagttactaaaagaacgaatagaaattataacttctagaattaaatacataggtggtgaagttcaagaagtttgtatagatgaaccatcttcccttgaacaaataatccaagtagaagaaaaactgggtattaaactaccaaatagcttcaaaaaagtacttttagagttctcaggaaattttagcttacgctggtttttacctgatgatgtagagctaccaaatgaatttactgatattttttgcggaacaccccactggagtttagaaagtctttctgaattcgaaaaagaacgtaaagacttggttgacgagtttttttcaaatctagatgatgaatatgatgtagtttggcacaacaaattagcattttgtgaagtgggaaatggagattatttagcatttgatatgaaagatgatatagatgctccgataatttacctaagccacgacgatggagaaggacatgggtataagattgcgaataatttcattgaattcattgagaattggtcaagggtagcttttgtaggatgcgaagattggcagtggttacctttcactaccagttttgaaagtggtgtaaatccagatgatgaaccagccaaaaaatttagaaattgcttggaacttaatatttaaaagagtattgaattaaatttcaatactctttttgtgcaatttaattatatttgattaatgtagtgtcttacagattattcatttcataaccattgacaaaatacgttattgtttctaactcatctgcatttaattctctatctagctcttgtttatacgctgcctttatcttctcttcatcgcctttatgagcttctgtatatgttcctactgtttttagcaaatgaatttcttgtaaaaactcgtctcgatttatagctgccccatgagaaagaatatatgtctcagcatcaaatttctctaattcatctatcaatttaaacgttcttttcgtcgtatagttccactttgaagaaaaaatatctgcatatatacaatctcctacaaacaatatcttttcttcttttatatacataacaactgaatcatgcgcatgatctccgcccacatgttttaacacgcatgtcacttcaccaaggtctaattccatttgatcctggaacgttaaggttggaggaataatgttaatatttctcgctttttcttcaaactctttcttaatacaatccgcacaaaatgcaatttcagtaccctcttttacgcgtgcgtccaacgcttcatctgtccattcataagatactattgcctgcatttcttttttcgtttcagcctgcgaaatagttaatgcattctgtaatacagataatccaaaaatatgatcccaatgccaatgcgttaatgctacaaaatcaggattcgatacattttgttcttttaacatttctaaaaataattgtgcatgttcttctgaatttcctgcatcaatcattaacgttttttcttgtccaacgaccattcctaagataggtctatctgtttcagaaacaggtgtcatataccaaaatgagtttcctatttttttaatttgttgcataaccaattccccttttcattttctcacttaaaattaatatataaattataacgaatcactacttttttctctataatcaaacacaattacttggactaatctaactttccttttcgtaagctaaaaataagggaatagaatcggagtgtgatactatggaacgtttatggattccaatgattgtaacatttttttcgttcggtggattactattaggaggtgctgttggagtagcaacacgccaacttattgaagaaaagatgcatcgtttatacgcattatgtggtggtattttacttgggcttttatcccttgaaattattcctgaaacattttcaagctacgaaatggttgggcctatacttggtatagctatcggtattttagttatgagcttattagataactattgtcaccatccaatgatacataaaaaagatcaacaagcatggcaaaccttcctttttctctctttcgctatatttattcataatataccgagtggatttgcgttaggtacagcttttataaatcataatgactctgccattccctttttaatagcaatcgtcgttcaccatattccagaaggattagctttaattattccatttctttttacaaaacataaatatatttcctttttattaacgactttattactttctcttattctcggtactggcacagtttttggcattttgatggaaggaaaagctcttcacctgcaaggcctcattatgggaagtgctatcggttcacttggatatgtcacaattcatgaaatgctttggaaagctaagaaacagctctctttccttacatttctaatgtgggcaactagtggttttttactaataacagtgttcactttattcgctggtcatcattaaagttgctaaagtgaaacttttgttcctcccacactgattcttggattacaaataactagataaatttcttacttgtatatttttcctttttattcaaaacataatgttatctacctattataaggaggaacaattatgtttgggaaaacagcaggtgaagcattagttgatttattaattgattggggagtagagcacatatacggtatgcctggagattccattaattctatcattgaagctttaagaaaaaaacaagataaaattaaatttattcaagttcgccatgaagaagctggtgcattagcagcggctgcctatgcgaaattaacaggaaaacttggcgtttgtatggcaattgcaggacctggtgctattcatttattaaatggtttatatgatgcgaaactcgataaagcccctgttctagcaatttcaggtcaagtagaaaccgatttacttggaacggactttttccaagaagtaaatttagaaagaatgtttgatgatgttgcggtttataaccagcgtattatgtcagcagagcaactacctgccgtagtgaatcaagcaattcgaatggcttatacgaaaaaaggtgtatccgttcttactattccagatgatgttccgaaatttgaagtgaaaaatggtgcccgtgttacaaatacttcttttactttgcctgagttgtttccacaaaaagaagatttagatgcagcgaaactcgcaataaatgaagcgaaaaagcctgtgattttagctggaaaaggaacaaaacatgcgagagaatctttacttgcattggcagaacaaattggtgctccaatcgtacttacattaccagctaaaggaattattcctgatgaacaccctctttgtattggtggattgggattaattggaacgaaaccttcttatgaagcaatgaagcatgcagatactttaattatggtcggtacttcttatccgttcaccggcttcttacctgaaaaagcaaaaacaattcatatcgatacagatcctgcccaaatcgggaaacgttatgcgacagatattggtttagctggtgatgctgataaaacattacgatggttaattgaaaatgttgaagaacacacagaccattccttcttagaacagcaccaagaaatgatgaaaaagtgggaagaaaaattacacgagcaagaagaagactcttccattccaattaaaccacaacgcgttatgcatgctctgcagcaagtagcacatgatgacgcaattctatcagttgatgtcggaaatgtaacagtatggaccgcaagacacttccgtatgacaaaccagcaatttgtcatttctagctggctcgcaacacttggttgcggtttacctggtgctcttgctggaaaaattgcattcccagataaacaagtatttgcagtttgtggtgatggcggatttggaatgacgatgaatgacttcgtaacagctgtaaaatataaattaccaatcgttgtcgtcgtattaaacaataataaaattgcgatgattaaattcgagcaagaagtcatgggtaatatcgaattcgaaacagatttaacgaaccctgattttgcaaaatatgcagaggcgtgtggaggtattggataccgtgttgagaatttagatgaactccttcccgctttcgaaaatgcagtaaaacaaaataaaccgtgtattattgatgtagttgtagatgctaacgaagcaccaatgccagcaaaaatcacatttggtcaagccgctggttatacgaagcatatgataaaagaattatttgaagaaggtaagattgatttacctccactttaaacgaaaaaagatagctgaaaacaatttgtcttcagctatctttttttatttttgtatctctttataaaaagaaaagtcattcatagttggttgtacttaagactcttattttttatcaagagtctttttatttaatttcgcttcagttaatactatgtaatactatgcatctaaaaatctttatacatctcgctaactatttcaattctctaaagttcggatatactttattttatgaatgtatcgcacatccacttatagaatttttctttctcttcaaattgtggataatgagctgatttctcaaaagtaataaattgtttttgatctgcttctatcttatcaaaatatgtttttgctgcatggaatgaagcttagtaggcaatggattttttaaatccttttctaataagacagtttgagaatgtgataatccaacgttataacgaattacgtctaacaagttatattcattacagaaagatttgaaaacatctcgcatacacatttttataaaaacacatagaaaagagcccttgctttcaacacaaggactcttttcataaactatttagctacctcttctttcggcattaccatacctttataaagttgaacagttatccagtaataaatgaaataaatgacaaagaagattcctattggcacccatacttttacaaacgggtcaactaatataaagctgaataagttaagccctactaatacgtgggaaatgccaatgatcgctgggaagataaataaatatgaaatttctttatatatacttttcgttaacatactgcgtctcacaccaatttttcgtaacatttcataacggcgtacgtcgcgagaagcacctgttaatattttgaacataagggaacttgccatcattgctaaaaaggcaattccgaggaaaaatcccataaacattgttccgctcatgaagctgttcataaactgataaattgtcattttcgtaaataagtctaccttttcacctgttgctttttcaatttgttctttttgtctcttgtctatttcgatcaataacggtttatattttttcatatcatctacttttgctaatgttacagtatgttctgttccttgaatccctttataatgctcttcgtctgcaatccttactggttttccgctaaattgattatgcgtaatttgtatctctcttacaactgcgtcttcccaatcctttggcatttgagggaattttgctaattcaggagcctctaaagctgaatatacaggttcagttaaaggttcagtcacacgtttacgaataggctcttttaaagtttttgtatcaaaatggtctgaaacaagtggtggtttcgcagttaagtcgttacgtaaataataaaccgcttctccatctactttatatttgtacttgctttcttcaacaatttccatttcttttaaggcagctttatcttgatcattcggatcatgaattacaacatcatatacacgagaaaagtctgtcataatacctacatttttttggaacgccatacctgccgtcatcgcacctgcgcctaatgcaattaacattgctacagtacctaatactctcgataaactatttactcgaaagcgtagctgtgcatatgtaaaactatttagaccagtttcatttcgttttttattccccttaattttcatcacaaaaaatgggagtaatgaactaaagataaaatatgttccaagtgttgtaacgatggttgctataataaaacctaattcagcataaatttttacattgatcataaaatagtaccctgtacttactagtaatacaccaagtactgtcattataataatgcgagttttacttttcttcacttcatctagtgtttcatcttcacgaattaactctagttcagtttttcgtaacaatcggacactgttcattatgccagtaatgaaaaataatattaagaagaaaatagctgtaactaaaattgctggtgtgtatacagatgcgtaactaccttttgctgaaatttccattccattcattaaaaagttccctgctacacttgcgagtaacatccctactaaaataccgataataatactgacaatacccataccgaatgtttcaataaataataactgtgctacttttttcttttttgcaccaagcatcatgtacataccgagttcttttcttcttaatgtgagcaagaaagagttggcatatataatataaaatacagtaatgaaggataatagtattgcacctacccagaagacgagccttatactactaattagactattatcttttgtaaattcactattcatcgccatcgtttggaacatgtagaaaatactaatactaataacgaggccaataagtaaaaccatataatcttttaacatctttttcatactatgacgtgataatttaaataacatagtttcaccccctacttagactcagcagctgagcccatatgagcgagcacacctaaaatgtcttgatagaaattctctcgagtaccttgacggtttaattctttataaagaagaccatcttgaataaataaaatacgctcacaataacttgcactaaatgcatcgtgtgtaaccatcaaaatacttacattgtgattttcatgtaaatcttgcatcgcttctaataaactttttgcgtttttactatcaagcgcacctgtcggttcatctgctaatacaattgctggattatgtactaaagctcttgccgccgctgttctttgcttttgtcctccagaaacagccgtcggatattttgttaaaatttcggtgatgcctaatttcttcgcaacgtcatttacctttccagtaatctcacttgacggtacgccttgcaaagaaagtggtaaagctatattttcataaattgataagttttctagaagattaaaatcttgaaaaatgaaacctaatttttgagagcgaaaatcagataatgcattgcccttcatagaagtaatatttgtaccagctatcgtcacactaccacctgtcgcttggtcaagtgtacttatcacattaagtaaagtcgtttttccagacccagaaggtcccatgatcccgacaaattctccttctttaatacttaacgatacaccccttaatgcttttgactgattctcatttcttttcccatacgttttttctacactttctacagtaactacatttgttgacatctctttcactccatcccttttgtataaaattaatttctcacatatttcttattattttgtcatgtgaattcttaagaattttttaattattcattcaagaagagttacacctgtaacatgaacctttttcctacttcatattctcatttttctacaactcgttccctcgatttcgcttacatttaccttacatttttgtaagataaaaaagaaaacacactaattgctaatagtgtgttttctttacaatcaatattttctattctttatttcctcttcaatagttgccacaaatacatctagcgcaataacttctgacttctcttccccatatttacgtacatttacagctccgttttccatttccttatcaccaataacaagaacatacggtactttttgcatttgtgcttctcttattttatatcctaatttttcatctcgtgcatcttgttcaacacgaactccagcttgtgctaatttatgtgcaatctcattggcatattgttcatgtactgcatttgaaactggaattactttcacttgaactggtgccacccatgctgggaacgcacctccaaagtgctcaattaatattgctaagaagcgatctaatgaccctaaaactgccctgtgaataacaactggtcttttcttttcattattttcatctatataatttaaatcaaatttctctggcatttggaaatcaagctggattgttccgcactggtggcttctatttaaagcatctttaatatgaaaatcaattttcggcccgtaaaatgcaccgtcaccttcatttagtctatatttataatttagcgattgtaatacattttctaatgccgcttctgcttgctcccataatttatcatcacccattgaatcttctggacgagtagaaagctctacttcatattcgaatccaaaagttttatatacgtaatcaatttgcgccattactgatttaatttcatcttcaatttgttttggagttacaaataaatgtgcatcatcttggcagaaagtacgtactcttaataatccgtttaacgcaccgctaaattcatgacgatgtacttgaccaaattcacacatacgaatcggtaattcacgataagaatgcaatttatttttaaacataagcatgtgccctgggcagttcatcggttttaatgcaaaacttttattatctacttcagagaaatacatattatctttataatgtccccagtgccctgatctctcccatacttcttggttcatcatgaacggagtgcgtacttcttgatacttatactctttttgaatttctcttaaaaatgcttccaattcgttacgaatcatttgtcctttcggtaaataaaacggcattcccggagcctcttcagaaaacataaataactcaagctcactgcctaacttacgatgatttctttttgctgcttcttcaacgaaatgtaaatactcttctaattctttttgagaagagaatgcaacaccatatatgcgctgaagcacttggttattactatcacctcgccaatatgcaccggaaacgtgagttaattgaaatgctttcaaataacctgtagatggtaaatgtggtcctctacataaatctacaaattcaccttgtttatatagtgttacactttccccactaggaattgcttctaaaagttctaatttcaagcggtcgttcatttcttgaaacagtttagctgcttcttctcgagaaacctcaactcgttctatctttatattttcatttatgatctttttcatttctttttcgatttttcgtaaatcttctatgtttacactacttggaagatccatatcataataaaatccattttcaataacaggtcctactccaagatttatatcaccatacaatctttttacagcttgcgctaaaatatgtgccgcggagtgtcttgcaatttctaccccttcatttgaatctatagtaatgatttccacttccgcattttcttcaatatttcggcgtaaatcatataatccatcatttactttccccgcaactgctttctttttcaaactactgctaatggatccagcaatttcttctaaagtaactccatttacaaattctttaacgctaccatctggaaatttaatttcaatcatttgttctttcatttttcatctctccatttcataataaaaagcacactcatccctaaaatagggacgagcgtgcttttacccgtggttccacccagattcccattgtaaacaaacaatggcttcttttacggtaacgtcgtttatacggcactagatacttaatttccccagtgcagctctaaggtggtaagttatttttctgcgttaggaagttctcagctttccttccttctctgtataaccgggtaaaataactcgtgtccttttcttcgcttattatgaaattgaatgcaaaaaagcatattcatccctaaatatagggacgaatatgcttatatccgtggttccacccagattcccatcacaaaaaaacataatggcttcttttgcgataacgtcgcatacacggcactagatacttaatttccctagtgcagctctaaggtggtaagttatttttctgcgttaggaagttctcagctttccttccttctctgtataaccgggtaaaataactcgtgtccttttctttgctttttataaaacatccatttattgttatttaatatatcttattcattttatttttgcaagtgtttaaaaaaattatttatttaatttaaaaaagtgaaaccaaatttttttggtttcacttcacaattttaccaatcttgtggttcgtaatttaagtctgcaaatagacgtcttttctctttcttcgttaaatctctccactgcccaactggtaaattattcaattcaatattcataattctcgtacgttttaacgtgtatacttgataacctaaagcttcacacatacggcgaatttgacgatttagcccttgtgttaaaataatttggaactcatattttgataactgtgtaatctcacaaggaagcgtttttgttcctaaaattttaacacccgctgccattttctctaagaaatcaggtgtaattggcttatctactgaaacgatatattctttctcatgtttgttttcagcacgtaaaatctcattaacaatatcgccatcattcgttaacaaaattaaaccgtcagagtctttatcaagacgtccaatgtgactaattcgtaaaggatgattcactaaatcaataatattaccttttactgatttttcactcgtacatgtaatacctactggtttatttaaagcgatatatacgtgatctcgagcaattcgaagctgctctccatttactcgtacatcatcacctgggttcacttggtcaccaatttttgcaaccttaccgttaataattactcttctctcattaattagtttatccgctccacgtcgagacgcttttccagcttcactaataaatttattgatacgcaaattaggcacatccttttctaaaaaaatttcaagctcacactgcttctaccgtacaatacaaaagggtaagcctcctattataacttaaatatattaacatgaaagggtatataacgtcttctattaattacttgtttataagaaaatatctttattatacattcatttatgcactttttcagcgtttaatatacaagccattcttccttacatacagcttgttttccttttatctcttctatctcttcatgaatattagctaatttatataaacctgggaaaatctcttccacataatgttgatgcgtcttttcatctttccaatacgttaacactatgtaacgatttttattttttaaagacttcccaactactccacctaacattccttttgctttttccattcctttattccaaattgtttcttgcttatgtaaaaaatgattttccttttccatctttacatcacatatagcaactcttacgaatgatccttctgtaacaacgtctttcaaatgcgtatcagttatatcatacaacgtttgaaataattcaatttcacatgaaagaaacgtatcctcttgattactatttaaataaattgtatcgtgagcaccattcataaatgattgatatgcacttctatcttcccataaagtaaatacacatgcctcatcttcataccatccaccaaattgtccatgaaacccatctaggtgccgtatatcacgccattttccttgcgcatttgaaaacaattcctttttctcttcttccaccttacagtagattgtttttagtagcatttttaattccccctttagcatataatttatcttcttctcacaataattagttcacataatatttttataatcaccctaatactctttatagacatatagaactaatcatatttatcactacatctatcgaatttaatttcaaatgattcagaataaaaaaagatgtaactcttaatgaattacatctttagctaatctcccttattcatctttttctcaaataaataatacgtaatgtctcctggataatgtactactgttaccttccgctccccttttttaaaactaacagtatgcccgttttcccctaagttctcccatccactcgcctttgtaatcggcattacacttatatattgatagtcctcttccttatcatcgttaatatgaattgctgacattggtactggaaaacctttaattttagattctttattcataaatatgaatgcaattacaccaactaataacatagccattgaaatacttgaaactagttttcttctattcattttcactaaaaaccctcttttctcacatataactttcatcattttactaactttaattatttatgtatagagaagaaataattttaattatttctaacctattttctctacttaaaacaacattattattatatattataattataagtttttaaattttggaggcgttacatattgcagaaattactttttactaaatggacagttgttatttctattttcatcatttttggtacaattttctacgttactaatgttaaaaataaccacgaaaaagcaactgtagaaacagcggagacaaaaactttcaaaactaaattacaacctaaaattaatgaattgactactcattataatgacatcatcgaaaaagattggttacctgcctgggaagagattaacacgaatggagattcagtagatcgaaataaactattagttacaatgagtgctgtttccaagcagtacgaaacaattatgaacgaaatagacacgcttaaaattgaagaaaacataacagatatagatatacaaaaacaactacttcagttcacaactcagtttaaatccgcatcaaatttcatgaaaaatgcagcaaatttaattatagacggagcaaataactctactccaaccgatgaaactattgaaaaaacaaaacaagctttaggacttgcggatcaacatattgtcatcgctttatctactttaaatgaagttgaagataaattaggacttacaaaaaaataaaactatttactattttaaaataaaaaatgattgcaattcacaatttgtatgtctataatatttttattgatttacaatcaatgtgtttataaattttataattcggatgaaccattcaggagaaggtctattgatctaccgacggggcaaaaagttgttataccagctttgaaactctcaggtcttggttacaagtagaactgcatggggacgaatctctggagagactccctctcgctttcatagagcgcggaggaaaacgagcaccgaaggagcaaatccgctactatagcggataatctctcaggtaaaaggacagagacaagcgaaagaaaatgccgatttgtatcggtttatttttctatcccttgtttctccagagaccatttcatttacttgaagtggtttttattttttctaaataaaggagaataaagatggagacagtaagtaaagtattagaacaaatgaatcaatacgtgtggggattaccaactttgttgctactcgttggaacaggtatcattctcacagtgcgtttaaaaggtttacagtttagtaaactattatacgctcacaaactagcatttaaaaaatcagaagatacctcttcttctggagatattagtcacttccaagcacttatgacagctatggccgcaacgattggtatgggaaatatagccggtgttgcaacagcggttacaattggtggtcctggtgcaatattttggatgtggattaccgctttattcggtatggcaacaaagtatgccgaggcaatacttgcagtaaaataccgtgttagtaatgaaaatggtgaatattcaggtggaccaatgtattatttagagcgtggtttaggtaagaaatggctggcagtattattcgctatattcggctcaactgcttctttcggtattggtaatatggtgcaatctaactcagttgcagaggcaatgcgaattaatttctctttccctcctgctttaactggtatagtaatgtcatttttaatcgcaattgttattttaggcggtgtaaaaaaaattgggaaagtgacgggatatgtcgttcctattaaagctttcttttatataattgctggtcttataattattttctatcactacgaccaaattccagaagcattttcacttattttttttggtgcatttaatggtacagcagctgctggtggttttattggggcaacagttgcatcagctattcaaatcggaatggcgcgtggtgtatttgcgaacgaagctggtttagggagtgcccctattgccgcggcggcggcaaaaactgattcgcctgcaaagcaagctttagtttcaatgactggtacttttctagatacgtttattgtatgtacaattacaggactagtattaattactacaggtgcttggagatctggtaaaactggcgttgaagctacaacacttgcattccaatctgtatttggtactgctggtagtatgattctcggtatcgcaattattttatttgcctactctactattttaggctggtcgtattatggagaaaaatgtgtagcttatttattcggagaaagtgcagttaaatattataaagcaatctttattgttatgattgcaattggtgctaatttaaagctaggaatcgtatggacatttgctgatattgcaaatggacttatggcaattccaaacttgattggtctaattggattaagtagtattgttgttgctgaaacgaatcgctttttacaagcagagaaattgaaagaaaataataaaaaacaggcaagttaatctatgaaaaaaggaatgactcatacatgatgagcgttccttttttcatcccctcttttacttaattactatcattaaaaatatatttatatcaatatttactcctttttattccttcaaaagtttttcacataaatgtcataaatcgtatggtttaactatatagttgaaaaggaatgcgacattaaggtgtcactgaaaaactcatccaagaaaagggaggaaaaatcttttgaaaaacaaaatcatcgttttcctatctgttttgtcatttattattggtggtttcttctttaacacgaatacttcaagcgctgaaacatcatctactgattacgttcctaaccaattaatcgttaagttcaaacaaaatgcatctttaagtaatgtgcaatcttttcataaatctgtcggagctaatgtcttatctaaagatgataagttaggttttgaagtcgtacaattttcaaaaggtactgtaaaagaaaaaataaagagctataaaaataatccagatgtggaatatgcagaaccgaattattacgttcacgccttttggactccaaacgacccatattttaataatcaatacgggttacaaaagattcaagctccacaagcttgggatagccaacgaagtgatcctggtgtaaaagtagctattattgatacaggagttcaaggctcacaccctgatctggcttcgaaagtaatttacgggcatgattatgttgataacgacaatacatctgatgatggtaatggtcatggtacacattgcgctggaattactggagcacttacgaataacagcgtcggaattgctggtgttgccccacaaacttcaatttatgctgtccgcgtattagataatcaaggaagtggtactcttgatgctgtagcgcaaggtattcgagaagctgctgattcgggtgcaaaagtaattagtttaagtttaggagctccaaatggtggtactgcattacaacaagccgttcaatatgcatggaataaaggctctgttatagttgcagctgctggaaatgctggaaatacaaaagctaattaccctgcttattacagcgaagtaattgcagttgcttctacagatcaatcagatagaaaatcttcattctctacttatggtagctgggtagatgttgcagcaccaggttcaaatatatattcaacatataaaggaagcacgtatcaatcattaagtggtacatctatggcaacacctcatgttgcaggagtcgcagctcttttagcaaatcaaggatatagcaatacacaaatccgccaaattattgagtctactactgataaaattagtggtacaggtacgtactggaaaaacggtagagtcaatgcatataaggctgtacaatacgctaagcaattacaagaaaataaagcttcttaagaaaactttaatcagtcgatctaccatgaatgcagaataaaatagaaggagagacttctataattaaagcctctccttcttacaaactatattactctccctgctttttaaccatatgtaaatacagtacaaaatccatcattgtcgatgaatgaccaagttgacgaatcatcgctgttatatttcctctatgatatgtaccatgatttacgacatgttgcactaattctaaaatcgaagtttctaatttccctacgtatggattctcaataacaaatacagcattcacatcttgtattgtaattaaaaactctttatattgatttgccatgttttcaaacattttttctaattcatgtaacgatttagtttcaatttgttttcgtaaatcttctcggtcttgtattgcttcattcatacttttaccatgcaatatatgtaaccacacttgatctgtaatataaatatgcacaaaagtatccttaatggatgggaatacactctgtatctgctcattaaaaattgtctcatagtttggtaactcttttaatcgattgaataatctagtattagcccaagcatgataatcacactgttttaatatatactctttcaatttatattacctccttattgtatgaaacgaatggtttgtttcttcatttctgattctctatcagcctttgcaatccctttttctttcatttcatgcttatttatcgttttatattttacatacgtataaaattccgtttgaaatggaaatggtgtaatccgaattgtttcctcgtccacccattgagcttgaataagtttctcctctttactattaaacatttctgttccttcaaaaccatctttaaataagtcaatttcatctttctttttgacaccaggcttattcatacatacgtataaagaaagttcatcacaaaactttaataatctataatgcttatcgaacatcgcaaactgttcctttgttaacgttttcaaaattcttttttgtcgttctaattcatgtttataaaatgacatcatctcttcatcttcctcgtttagtgggaatgataaaaaatgtttactacaaagcaatgccccgtatggattagaattttcaatttcattcaatccaatcgtataaaaagcaaaacgtaatgggcttggacaatccataaatgtatatggaatatttttagcatcattcaaaattggtactttatcaagctctatccatcctctgtcatgctcatatattgcatcaactgtttcttttaaatatgttttatcttcaaaaaagtcttcttttatatgctttgcaatctctccagctaaaaaaccatgatcatgttgacgaattaaaatactttccttctcatttttttcacgaaaaatcattcgtatactccccctcatcctcatattaaagctttttatatgcatcgattcttaattaatccctaaataatagaagggattcagtctcttgcaacgaaattaacataattatatagtattctttctaatcatagtgatagctttatctttactatctattatactaaaacattcattccaaaaatttttttatgaggtgaaaacatgaacaaaacagaattaattaaaaacgtagctcaatcagctgatatttctcaaaaggacgcttctgcagctgtacaatccgtatttgacacaattgctaatgcattacaatctggagataaagttcaactaatcgggtttggaacttttgaagtacgcgaaagatctgctcgtacaggacgtaatccgcaaactggcgaagaaattcaaatcgccgctggtaaagttcctgcatttaaagcaggtaaagaattaaaagaagctgttaaataaaaacaagaaaccagccattttataggctggtttcttgtttttatttaagtaattgctttatattctctgcatgatacacttcacaaatataaaatacacatttgcagttacttacaatttgatactttctagttggatacacattcgctgtaacagaacatccatcaaacaattcaataatatttccagatggctgatatccttcatataatacgtttcttcttacttccatcttttctataagcttttcaacaggaatatttccactctctaattcactctttattgcgtccggtaaaaacgaagtgtctgcaaaaattagattttcagataacacctttcctttataactaacattagatacacggtaaagaaatgttccatctttatcaaaaaaattctttgcttctttcggaatgtactgtctaccaagtgcctcttgttcaagaacatcaaactgaactgtatcatttaaaagcttttctaaagcatgaatggatgatgtatctccagaaaataaaatatttttaattgcttgtacattataagtgaattcattctttctattttccgctactaacatgaggaacacctcttctgtaatttttttatttaagatttaaaagtgctgccgcgtctaattgcgtaatttcagtcacttccttactgaatattgcaacagaagccctataatctaaactaggccttacatcttccatcattgtattacttgctaactcttgtctatccttaaaaaccaacaagtttggaggatcatttggagctgatactgtaatatgtactggtggaatcattagtccttcacctgtcgctttcagcaccgcttcttttcgagtccaatatgttaaaaaaccttctattttctgttcatttggcagtttcataacttgcgctatttcaatgtctgttaatacaccttctgccattttcataacatctatacttggattcatttgttctacatctatgccaacaggtgcagattttgtaaatgcaacgacaacccactcacctgaatgcgaaacggataattgcggcataccttctggtaattgtggtcttccatgctgcaatttacatactgagcacattcgatcaattggtacttggactggtgacatagaaagtatcttgccgagaactaatctacttattacgcaacctattataaaacgagctcgatctgccgaatgatgatacgaatttgctttctctcgctctatatcatttagtaaattgtaatgccatgattgtaaatccgaaattcttgcccaccatatttgacaatcattctcattcaaagttggaatagaatctacaactttactttctatcatgtaaactctcctttattcaacgaatatcaattttcataaaaaagcatacgtatattgttattcattgacaagtactttctctttttctgatacagataatgttttttctttcttctttgacattacctctttatcggaaatacgtaaagaaaatagtagtgctatgagcaaaaatattgctgacccaattaatgctgcttgatatggtaaaaaatcggattgaacgttattacctccaaaaacagctagtatactagctaaaaacgctactcctattgctgaacctagtcgattttgcacattgaatatagtagtcgctctccccatagaaggcggcgtgatattgttaaaggcagaaaattgaaccgcaccgacagattgacctaagaaaataccgataccaaacaataatgcccggatttgccacggattcgtatcgtgatttacaaaactcaataaaacaaatataaccgccgtacatattaatccaatagaaattacctttcgagctcctaatttcttatatgaccatggtacaatttgtgaagaaatcattaatccaatcgcctctggaaatgtcgtaagtcctgattccagtgcagaaactcctatcacattttgatacataagaggaaaaacaaataacattcctaataaaccagctgatgaaaataatgatataatgctcatctttctaaagactggttcttttaataagcgtaaatctaacatcggttgctttactttcagttctacaattataaacaatgtaatgaatacaaccccagctatcccagtactcataatttctggagaaatccacccttttgatggtccctgactgagtgcatatatgagcatcgcaaatcctggtgctgataaaataaagccgagcgaatcaaagcgaccagctgatttttcaacatgttctgctaaaaatagaagtccaaatagcaatgcaacgattccaaacggtagattaatataaaatgcccaacgccaagacatttgatctacaaagaaaccaccgatgataggaccaattgctggtgctacagcaattggaagtataatgaaccgggaaatcttcggtctttcctcgggtgaaaatgttcgaaataacatcgccattccaaccggtgttaaaagccctccgccagcaccttgaataatacggaaaatattcaatgaagtaatatcgttagccattccgcataaagcagatgcaattgtaaatacgaaaagagcaattaaaaatactcttttcgtaccaaaacgatctcctaaccaaccagaaatcggaaggaaaacagctaaactaactaaatacccaacattcaccgtccccattgcagatggaggtacttgtagttctctacttatcgtttgcagtgctacatttacaatcgttgcgtccatcgcagccataaacatcgcagttatataaacgatacttacaactacttttggatttagtttttctttcattatcgttttcctactaatgttttttcgcgaacttgattaccttgtggattcaaatctttccagttatattcaacatattctaagcaactctgcctactagcttcttcatatacgacattccagccaataggtacatcgagaaaagcaggccagagagaatactggccctcctcatttattaatactttatatgtgtaattatcattttcaaatggattcgtcatactctacttacccctttcttattctgcaaatatttcgctaatacttgtccaatttccgtaagtggacctggctgacatagatctttatgtctacaatcaacatcgtgctgcacaatttgcccatctaaataatttaaccacgtatttggagaaataggatcaaaccagtctggtataacagtagatctaaagaataagatatctccgttataaactttcggtacatatttccctaacaaccctactgaatttacatatgtttctttcaagttcaatatagtctcttcttcaagacttgctaatgcacttccatctttacgaaggatttcaactgcactttccattgtaagtggtttaccatccatgttatctgggtcatatccgcctaaagcaagtaatgcgattaacgcttcctcttcagtaggcgcttccgtattcggtaagaagtgtccaggataagaatcaagcataacgagtaattctacttcttccccttcattttgtaattgcgctgccattgcatgcacaacatttcctccaagcgaccaacctaataaacgatatggtccatgaggctgtacttcacgaacgtgtttcaagtaatccgccgccatctcctctaaactttttggaagttcttcatttttagcgataccacgtgcttgtacaccatagattggataatctgttcctaaagatttcataagtcctgcatagcaccaacttaatccacctgctggatgtacacaaaatagtggtaattgatccccgcttgctcgtaatggaagcaacacatcaagtgcactttgaccattccccatctcaagtctttcagctaaccctgcaacagtcggtgctgcaaataaagtgccaatatttagttccactccaagcgcctctttcatgcggctcataagctgcactgcaaggagtgaatggccaccaagatcaaagaatccgtcatcaattccaatttgaggtacacttagcacttctgtaaacaagtcacataacatttcttcttgcggtgttcttggaccacgactagaagatgatgcgataaattctggagctggcaatacctttctatctaatttaccgtttggagttaaaggtaactcatttactactacaaaagcgtatggaaccatataatctggtaaactaccactagcaaactgacgcatttcattcgtatcaatcgcttcattatttgatgcaacgatataagaaactaaccgtttatcccctggttgatcttcccgtacaataacggctacttgctcaactttagggtgcttcattatgactgcttctatttctcctaattcaattcggaacccacgaattttgatttgatgatctgcacgtcctatataatctagcgtcccatctttacgccagcgagctaagtctcctgtacgatacattcttgtacctggcttgccaaatggatctgcgataaagcgttcagccgttaatcctgctcttcctaaatatccacgcgcaagccctgcacctgcaacatacatttctccaactactccaggtggcactggttgtaaatagttgtctaacacatacactttaaggtcaggtatactgcacccaattaaactatttgctcgtaaagagacgatagtttcatctaattcaatataactaacatgtactgtcgtctccgtaataccgtacatattaataagctttggtgcgttatgaggatgtcgactataccaatcttctaagcgacttagctcaagtgcttctcctccaaaaacaacatatcgtaaagataatttttggccaatctcttcattttcacgatctgcttgcatcaattgatagaacgctgatggagtttggtttaaaaccgtaaccttttctttaacaagaagctgtaaaaattctttcggtgagcgacttacagtatgtggcactacaactaaacgccctccgtataataaaggtccccaaatttcccaaacagagaaatcaaaagcgtatgaatggaacatcgtccaaacatcgtttccgtcaaactggaaccaatgatcagttgctcctaaaagtcttactacattttgatgaggtatcataacgcctttcggtctacccgttgagcctgacgtataaataacgtaagcaatatgtgatggagataatggcttaatgcgttctacttcatcaatattttcttcactatatttctcaacttctgctattacttttacatcatcaactaaaacttttagtgcctcatcacattcaaattccacttctgaattcgttaaaacacatgttggtttcgcatcgtgtagcataaatgaaatgcggtctgctgggtaatctggatctaacggaaggtatccagcaccagctttaagaacagctaataagcttacaaccatgtttaatgatcttggcatcgctaaagcaacgagttgatcaggaccaatcccttttgctattaggaatcgagctattttatttgcttttctatttaactctttataagttaatttcttatcttcaaagacaacagcaatagaatttggatttatatgaacctgcttttcaaacaattgtggcaatgtcatttctggtgcaatttgaaaaccaccattccacttttctaacactgtatttttctctgctacagttaatatttctaatctgccaattgattgatccggatttgtagctgcatcatctaataacaaaatgaatcgttctattagtttttgaaccgtttcacgtttatataaatcggtactaaactctagtaatccatgtaaaccgttcggagtaccatcaaccccgttactctcactaatttcaaatgttaaatcaaattttgcagaaccgacgctttgaatttcaaggctcgcttctaaacctggtacatgaaacgttgcttctggtgtattttgaaaagctaacataacttgaaacaacgggtggctgtttcgagtacgtactggatttaacacttcaacaagcctttcaaatggaacatcttgattttcataagctgcaagatttacctgcttcactctatttaataattctttaaaacttggatctcctgacgtatttgtacgtaacactaatgtatttacaaataaaccaacaatatctgaaagtacatcatcatttcttccagcaatcggacttccaattggtatatcagtgcctgcacctaatcttgtaaatagtgcactaagccctgcttgcaataccataaacaaactaactccatttttacgtgcaagctctactaacctactatgcataccttcatctatatgaaaatgaattgtttccccgcggtaactcgtctcaattggacgctggaaatctgtaggtaactccatttggtctggtaaacctttaagttcttctttccaaaaatctaattgtgttgaaataagactctctggtgtcgtttcatcacctagcaattgctgttgccaaagtgcataatctgcgtattgaactggtagtgtctccagctgaactctgtcaccttgacatcgcgctttatacgacgctgcaaagtctctcgttaacggctgtaatgaccagccatcacctacaatatgatgtaataaaattaataatacatgttcgttttcactcactgtaaaaagttgtaaacgaactgccggctcaaaatcgaggttaaagctatatcttaccgcctctgaaagtacactttctaattcatctttacatgtattagttataaccatttctagatttaagttttccatatctaaaattctctgataggaactacctaatacgttagggaaaattgttctaagtgtttcatgtttctcaactacatcataaaaagcaccttgtaatgcttcccgattcaatattccattcatacgaatgactagcggaatattataagtaggacttggaccttctaaacaatttaagaaccataacctgcgctgtgcaaatgaaagtggaacttcatttggcctacttgctttctgaatagctggtcttgcactttttgcatcgtttaattgtttcgccagttcggcaacagttggtgattcaaatagtttcccgattcctaattccacacttaacgtttcacgaatccttgccattaaacgagatgcgagaagtgaatgtccacccatttcaaagaaattatcatcaatgctaattcgagaaacaccaagtacttctgcaaataaatcacataatatttcttctttcggatttctagcaactctctcattgtgcattccattaaaatcaggagcaggtaatttctttctgtcaaccttaccatttggcgttaatggtaattcttctagcacaacaaatgccgatggtatcatataattcgctaaactttctgaaacataagaacgaatttctgaaagattaatcggttccttttcttctgcaacgatatacgcaatgatgcgtttatcatttggacgatcttctcgtaccattactaccgcttgttgaatattttcatgtcgttgtaataccgtttcaatttcagctaattcaattcggaatccacgaattttaatttgatgatctgcgcgactaatgtactctaacgcaccatcactacgccatttcacaagatctcctgtacggtacatgcgcttccctgattctccataaggatttgcaataaaccgttcagctgttaactcaggttttcctaaatatccgcttgcaagtccctcccctgcaatatataattccccaataactccaggtggaactggttgtaaccctgcatccaatacatacacttctgtattgcaaattggctttccaataggaggtatacccttttcaccttcatcaatgttcataaaagtagaccaaatcgtcgtttcagttggtccatataaattagttattgagcaacctaattcttttaatttatttgctaaatgcgctggaagagcttcaccaccaactagtatatttagcccttgtagcttctctggataatcagttactaacgcctgccaaagcgtcggtgtagcctgcataatggtcactctttcttcttgtaaaagtgtcgttaatgctgatggctcttgtatgtcttctttttgcgcaattgttaaacttgcaccactaataagaggtaaataaatttctagagcagaaatatcaaacgcaaacgttgtaactgctaataaatgatcattttcatttaatgaaaacttttgttgcatagccattaaaaagttacttaaacctctcataggaacaattacaccttttgggtttcctgttgagcctgaagtatatattgtataggctgggtttaaaagtgatacatcattcttacatgctatattcatacgagaatatgtatgtaacgctagtttcgtttcttcttcatctaatacaatttttttcatatcattttctataactaacttagatgaaacagatgaatatgttatgatacaaactggttttgcatcatttactatataattaattctttctgctgggtattctggatctattggtaaatacgctgcaccagcctttaagactgctagcatactaactaccatttctattgatctagggaatactaaagctacaaattggtttggtcgtattccttcttctactaaataatgtgctagttcattcgctcgttcatttagctctttatacgtaaggtttacaccgtcacaagtaatggctagtttattgggatttttttgcacttgtttttcaaatgatataggcagactgattaactcatcgtcttccttcgtttcattccattccaataaaactttatgattttcttcaggcagagtaatgtttatttttccaatcgactcgtttttctcataattatttactactaattcaaatagactcataaatctttctttatgcaatgctagctccgcgccattatatacttcaggatttgcatcaaaatgaatcattagctcattttgatcaaaacgtttatatacatttattgataaatcatcgacaggtcctgctgataaattatgcgtaataccacgattcccagcaaaatttagcccgtaatcaaaaggtataacattcactaacggtccaaacaacctttgattttcacctagtaactttaagtctcttcttaattcctcatgacggtatttataatggcgacgtacatctcggatttctttagaaacttgctgcaataattccgcaagagttatatttggagttactgtaatacgaagtggcactaaattcattaccatacttggtgtatgaatagataccgaacctagacgtcccatcatcggtaaacctaaaacaatatcatttgcacctgttaacttatgcatataaatacttgttacagcgacaatgaattccggccaacttgttaacgaaatattgatatcttctaataaagttttcgtgctagaactagataaataagctgtttctcgtgaaaatccatttgatgttctcggtgctcgctctgccaagcttacaacttctggttcatccgcaaatttttctaaccaaaaagtacgatcttcctgaaattttttagactcacgatactcaatatcttcttgcacgacttttgtaagagaaccaaacggcttttcattcttgtttgtttcttctataagtgatgtatactcattcgccactttttggctaagaagtgaaaatccatagccatccatcacaatgtgatggatgcgctgataccaaaagaaacgattattttcaacttgaataagtgcttcagtaaataatgtatcttttttcaaatcgactggcatagataaatcatttttcatccatactttagcagcttcttcaggattttcttctttacgaacgtcaataaaatgcatatgaaactgtgattcttcaataacttgccatgcgccaatttcatcctcctcgaagcgaacatgaagtgcttctgcttccattacaactttacgtacagctaattcgaaaatttcttgatgaatatttccgtttatttctacatattccccagtattgtaaattggattaagcggatctaattgttgcgcaaaccacataccagactgcgcagatgataacgaatgacgaatcttttgactgttaggcattctttactacccctttattatgtagtctatttgttacagcacctgtgctgtttgtgaagatagtaaactgtaccaacctgcaacagttggacgttctgctaaatgtgcaaaagtgatttctttcccttcacgacgccacttctctactaaactcataattctgaccgaatcaagccctctatttaataagtcctcatcaatatcaatactctctactggctcacgaagtagttgtgcaactagttcatgcacttcctgtatagtgattccttcactctcatcatcttttacactttgtaaatcgtttaacagtaggtttgttgatgtcgttactgcacatctattagatgcatacttcaatgcttgtttatgatgctctagtgaaaaatcagcaactgcatctgctacaaagaacggctctataccatccataaatgcttcacaagctgttaaaagacagccaatatgcgcataaataccgcaaataatgagttgatcttttccttgttcatttaaaatttctaatagatttgtctttttaaatgcactatatctccattttgtgaggaatatatcatcctcatcaggagtaagttcatcaacaattttctttttatctggtccagcaggtataccgtcaccccaaaagtcttgtaataaacctcgttgttctaacgtttgcccaccaggttgtgctgtataaacaactggtataccaagttccttacatttttctcttatcatttttatatttgaaataagttctacttttggtgattctttatcgctatatgcatcaagaaaatattcttgcatgtcatgaattaaaagtactgcacgtttcggatctggcgtccaattcactttattttttggtagttctgattcaattggcattttatatactgaaatagatgggatagccatctaatcacttccttccggtttttattattgttttactgtaataagcttttcagcaatgactttacgtagttcttttttgctgacttttccgactcctgtttgcgggaatgcttcaataaattcaattcgatctggaattttataagccgctataccacgttctcttaaaaacatttttaattcacttactgctggaacttgtccgcgagctataacaaaagcacaggtgcgttcacctaaataatcgtcaggcatagatacaattgctacgtcatggaccgcatcgtgtgctaatagatgattttcaacttcttccgcagcaactttctcaccaccgcggttaatttgatctttatctcttccttctacaatgatgtatccttgttcatttacttttacaagatcacctgtgcgataaaatccatcctttgtaaatgatcgtgcattatgctcttcggctttatagtaaccacgaattgtatatggacctcttgttaataaactacctacttcgccaggttgtacatcgttgtcattttcatcaacaactcgtacttcatcgagtgcagacattggtctaccttgtgtataaataataaattcttccggatcatctaatcttgtatagttcactaatccttccgccataccgaacacttgctgtaacgtacatccaaatgtaggacgtatacgttttgcaacctcagcgctaaacttagcaccacctacttgaataatctctaggcttgataaatcggcattacgagaagatgcagcatcaagccaaatcattgctaatggcggaacgagcgctgtaattgtaactttttctttttcgataagagcaaaggcctcatctggactaccaccagttgccaataccacttttccacccgcatagaaagttccaaatgtccctggagaactcattgggtaattgtgtgctactggaagaactgccatatagacgctttctgcattcaaattacaaatttcagcgctaacacgtaaactataaatatagtcatcatgtgttctaggaattaatttagaaagacctgttgtgcctcctgataattggagaaatgcaacatcacttggctgaacttctggtaatgagacgggatccatatacagatcatttatgttcacaaactcttcttcttctcccactacaattacatgttgtaaagttggcactttctctttcacttctcttgctaattttcgataatcaaaaccgagagccttatctgaaataacgtaagcgctcgcctcgccaaactcacaaaaataactaatttcactgcttcgatgtgaaggtagtgcaaagacaggaagcgctccaattcgaaatagtgcaaaacatatttcgaaaaactcgataatgttaggtaactggattacaactctgtcctctttctttattcctaaattcagtaaacctgctgctaaacgatctacctttttattaagttcactatatgttatatgcttcttaccacttacaaccgcgattcgatctccatatttctcagcccgctctcttaacactcctccaaatgtttcaccaagccaacatcctgcttctcggtaacgatcggcaaattcttttggccattctgtataacctactagcattctttcttccccctatttttcattaagtgaactatctcttaaccctaaagcttttagcattgtttggaacttagctgatgtttctgctaactcatcttctggttttgactcagcaacaactccagctcctgcatataaacgaagtgtattttcttgtacttcagcacaacgaattgtaacaatccattctccatctccatttaaatcgctccatcctagcattcctgtaaagaactcgcggtcaaatggctcaatatgctgtatagcttctcttgctttttccatcggagttccgcaaactgctggcgtaggatgaagggcaattgctaattgtaaagaagaagtatttggatccttaagttcacctttcacttctgtagacaaatgccacatcgcttcactatgaataactgatggcttttctggaacatgtaatgtatgacaatacggacgaagtgcagcggcaaccgcttcaactactaccgcatgttcatgtaaatcttttggcgaagaaagtaattcctctgctcttcttttatcttctactgggtcctcactacgtggccttgaaccagctaacgggttagaaataacttgcataccattacgtgaaacaagtaattcagggcttgctccaattagcgtcttactgttctctttttcatctttcggtaaatttacagaaaatgtataaccatgcttattatgctctgctaattctcgcagaagtttttgcttatcaatcttttcggaagatttaacatctaacgatctggatagaacgattttctttaaatcaccgtcctgtattttttcaattccttgcttcacaccattcatatatacttcagggtctggcactggtgtcatttcaaatgttacattctcatttgtttcaagctgatttgttgtatccaattgtaaacgctcagaaattctgctatattctggtacgatgagttggacttcttttctacgatcaaatggcaaagcacccacaacgataggatttggatttccagcttgtttcgcattacttaatttcgcttgaacaagctctgggaaactttcaatttcacgatgctttactgtagtaaactctccttctgctaatatcgttcgagttggtgaagcgaaaaagaatgaagattcagtcttataatcttctaaaagtttttctgacaattcctttacagctatatgttcattcataatataataacctcctgaatttttattaaactcctaacgtagcaccgccatcaacacataaattgtgcattgtaatatgacttgctctatctgaggctaaaaataacactgcttcagcaacttctgaaggttgtgcaattttttgtaatggaattccgagtctatatgtattttgagaaccagcaattatatttttagctccattctcatcagcccatagtaatctttgcatctcagtttcagtagaacctggagaaactaagttgcagcgtatattgtatgccgcaagctctagtcctaaacatttcataaacatcgtcgttgcggcctttgacgcagcatacgcagccatctccattcttggcgtatttgccgcatttgaaccgactgtaacaattgcccccgattttcttaacatcatatttttacttaccgctcgggacatattgaaaacccctgtcgtatttacagagaatgttttattccaatcttcatcacttaacgaatgaattggtcccatacgtaaaacccctgcaacatttattaaaatatctattggcgctatttcatttgcaatatgatttaccatgtcttcagcagcggcgctatcactcacatctaaacgaaacgttttcatacgtgtattgtttaattcattttgatttaagagtacatttaacccctcttcattttgatcaaccgcaataactgtggctcctctttctaaaaacattttggcaacgacactgcctatgccttgtgctgcacctgttactaaaactgttttcccatcaaattcccctaagttcattttctctatcctttcacataaacattaatttcattaagtaacaccgatgatattgattttcattatcagttgtgttgtaaaaaataatacacttactaaactaattggtcaagtgcgcattactttaaaatccattttattgataatgtttttcatttaccatcttacaccgaaatgataatgtttctcaataaacttgtcaatctttttttatttttcagataaaccattttaatgcttcttaataaaatcatatgtaaacgcattaaaagtacttatattataaataaaattcaaagtcctctttttaaaattgaagaaactaaactagagatacgttcatttacaatgctttatgaaaaactcaagtatatattttctcaatatttttctgaaaatatatcttacaaatactaatgaatgtcttttttgtcatttaagatttaatatatatttcgaatacgatgtatcaatttattgtatttcaatataatccaaataggcatttcactcacttttacatctatgaaaatcataaaagtaatttaaccttgttaaaataactcataaaaaaagcatcctaattaatagaataggatgctttttcgtaatcatattgttatagaagatttatatacttatgctacgctgcgatactcttcttctttttcttttttctgcttaggtgcttgaattaaaattgcgataatgaatgacacgacacataatacacctattaccatgaacgttggtttgaatccacctagaagtgcaccgataaaggaacctgcaagcgccccaaatccaaatccttgatacacaattccgtagttcttactatggtttttcataccgaagaaatcaccaacaatagctgggaaaatagtgatatttccaccaaagcaaaacgctacacttgctacacatacgaagtaaataccataatttaaatctacaaaacttagaactaagactgaactcgccataacaacaaaagtaccagtaacgatttttaaacgcccaattttatccgataacggtcctaaaatgatacgacctaacgtattgaagattgcaaccatagccaccgcattagctgctgttgctgcgctaagtcctacaagttgaacaccaatgtcttttaccataccaattaagtataagccactcatacatgatgtaaataacatgataaataataagtatacttgttttgtgcctaacatttctttcgttgtgtattcctcagtttttgtttcatgaactgctccttgatctgcagcttgatggattaaacaagcaccaattacaatcatagctgtaacaattaaaccccagtatataaatgcttgggatacaccaactgattcaatcaactgtgcgttaacgtatttaaagattaagctacctgaaccatatgcagagacagaaataccagcaattaaacctttacgctctggaaaccactttattaaatttgatagtgaagtgatatatgctgtaccatctgcataacctacaacaactcccgctagtacataaagtaatattagtgaggatgcttgtgaactaagtattaatcctagtcctaatgctaatccagctatcataataagtttacgaagtccccatttttcttgcaatttactcgcaaataaagttgaaaatgctaaagaaagactagtaattgagaaagttatcgcaacagcgttaagactccaaccatatttactaactaaaggctgattgaataaactccatgtatatatcgtcccaagccccatttgtactataactgtgccaaggacaacaagccatggattaacagttgattttttcatacctttccgcctcctctttctatttcaatgctattcgctaaatttactttttttatgttcattttggtcacctcttttgatttgacaccttcattgtataagatgtttttgtttatgtaagcacttacaagatagagcgtcaaaaacatggaatcagttacaaaaaacgaaggatgaaatacaaaaaactactgattaaatacaatagaaaaattttttatacttcaatccaccttattttttataaaatcacaaatttttttccaataaataaaactaaatattcactaatatatctatccgtggtttaatatatataataaaaaaatatttctgtctttaatgaggaggtactatgaaagcaaacgtaggggatactatactttttcaacgaaataatttaaagattacaggatctgtattaaaactttatactgaatcggtcttagttgaaattacaaatgtaagcggtggtacttttgaatttgatcgaacaattgtaaatcataaaaactataaagttttaaatacaaatacataaaacaacacaaaatagcccctgctcaacagcaggggctattttatataaaaatatttcactagtttatataccctaaaacattaacaatcttactcgcttttaaattgttaatatgataataaatttctaaacctcttctctctgctcgtaacactttacccttcatttttgataaatgttgtgaaacagtagattgcggaatattcagtaactctgttaattgtgttacattacaagtttttctcgtacttaattcatttacaatttgcagtcggattggatgcgccataatttttaaaatatctacatcttcttctgaaactaaagtttttctcatttcactcgtatatgttgtcataagacattccccttttatatgaattccatattcataagatctatttccaaattttttaaaacccttgattaaaactttcatatagaaataaaaggattttaaatttttgaaaacagaacttacattcactttatttatttatttggtacatatacataatacaatgttaatatgtgctctatgtgaagttcacataaatttatgatgaagatttacttagccactcgcatcctactcatctaattacccactgcataaaatcatcagttattttaacacattttaggcgtttgtatatactatttataaaacaacttttataaaggggggattcatatgcctacagcgttacaagaagaagtcgaagaagcacgggaaacatatgtcagtcgtatcatcttagttggaggatccgctttatttttagtaggcggggttatctcagcaatttcagcctttaaaacttataatcgtttggagaatacgccgccttctacagataattcatagatattttataaaataaaacgtcgcctccaatatgaagagacgacgttttattattcatacatatgacactaaaagtatcggtagattccctactccattttctaagcttacttcaccacaaacctagtctgactacacccatccttttgcttcgttacttctaatacagctggcattgcgtttttcagctcttgaacgtgtgagatgacaccgataaatcggcctgatttttgtaagtcaattaaggcatctactgctttcgttaatgattcttcatctaatgaaccgaacccttcatcgatgaacatcgtttcgatagtaataccaccttcatatgcttgaatgacatctgccattcctagcgctaggcaaagtgatgcgttaaatttctctccaccggatagtgtttttacatcgcgtgtttggccagtgtatgcatcgtacacatctaaacctaatccactttgacggtttcttttttcaactcgctcacttcgttttaaataaaattgtccatttgataatttacgtagtcgttcgtttgcgatttgaacaatttgttctaaatactcaattaagatgtaacgttcaaatgatatacgactttcgttatcacctttcattacttcatataaatcaacaagttcttggaaggctttttcttcctcgtgaatttgttcgtcaatacgtctaatgttttcatgtaaatcagaaatatatgttaccgcattttgcgcacgttgacgtttttctttaattatatcaagattaatttctagatcttttatgtgttcacctaaagatgtaatatccatatactctttatcttttaattctgcgtttaactcttcaatttgttttgcaagtacttcaagcgatgaataataaccttgaatttctttttgtaacatctccatctcggcatcgcttaatttggcttctttatacgtgaattgatctgtaaacccactttgttctagctctttcataaagcgtgcaaaagtctcttctttctttaattttgcactttcaaattgattagaagcacctttttgttcagcttgaatacgtatattttcattttgccaatgctgatacgcttcctgcactttcttccattcgtcctccattaacctaagttcctgcatagcttgattaaactgcgcttcccaagcttgtactgtttgtaagctttctggaatatttcgtttatcatgttcatatgacgtacgaagttgcatacactccatttctgtacggtgctgcattgtttccacttctcgtttttgtttctgaagttcttctattttttcttctacgcttttcatgttcgcagcaatctgcttacgtgtttcttcacttgcttttaacgtattaacgtctgctgctaattgttttcctttttgaacaagtgcactatatgtttcaactaatttttcggagttgtagccgcgcttcacaacttcttctatcacttgttcatattgtagttgatagaaattccatttctcctctacttgcacatgtaatttttcagcaatgttcttcttatctcttaaatcgtttaactctttttcatcgatcgcattactttgctctgtagctttttgtggatgattcgtactaccacataccggacaagattcaccgtcatgtaaatgaagagctaatataccagcttgttcacttaaccagcggcgctccatgttttcatatgcacgaactgccacttgcattttattatttaccgcttctttttcttgctcgaatttttgtttttcttgccaaacatcatatgcttgttttaaaacttttgcatcttctcgcatattcgttagttcttccactttagctacatattgctcaagtgcttgttctaattgctgcaattcatcacacattctctgtttttggtttgtatgctcttctagttgttgatctaacttttgcatactttcttttaatttccctatttgaatttcggcattttgtaaattcagctttctctcagctaatgattcaatgatcgcttgtaactcttctaatctttgaacaagttttttagcctcttctcgttcagcttctttattctttactacttcatacttctcctgagcaagttcaaagctattcattatctgttcttgtttgacgattatctgttttaacaaactttcagctttctgctcattttccatcgcttcttcataccattgttcaaatggtaataagcgctttgcttgttccgcacgtttaaagaatttttctttcctttcaattgctgcacggttctcttgtaaagtgttatatttctcattcttttgttgtaaatctataaatttctcatttacagattttgctgcatgaaaacgtgtttctgcatcctttaattgcttcgtttgaacatcttgttctacttgtaattgctcaacctctgccttatacacggttgtttcttgttctaacgcttctactacttgatgcgtatttacatgttcttgtgccactaatgtctctaataatgctccatcacggattggtaatttaaaaacattacggaaatagagctctctctctttttgtttttcttgtaagacgtctttccattgttttctcttttgatcaagtaactcacgcattaatttataacgatccgttttaaaaatacgacgtaaaatctcttctttgttttccgtctcagatgttaatagttttcggaattccccttggggtaacataacaatttggctaaattgatgtttacttaacccaattaaatcttccacttttttgtttacgtctgttacatgaaaacgatcgacggctggaacgttttctccatcaataacttcatataattctactgcatgtcctgtaatagtcttattcccttgttttttatgtccaagttgtcgttttatttcatagcgtttcccttttaactgaaaggttaattcaacacttgtataaacattatcatcagcaaattgacttcgaagcatgctcgtatcactacgttcttctccactagcctcaccatataacacataacaaatcgcatcaaaaatcgttgtttttccagctcctgtattcccagaaatagcgaaaatacgatgttctccaagatcttcaaaatcgattatttctttctgtttatatggcccgaatgctgtcataataagctgaatcggtctcatcctcgttcaccttcccattcttgcactgtttgtaatacatctataaataggcgttctttctcttctgataaatctaaccccttcatttctttatagaaagcctttaaaagagataaatcatccgttttatgtcttgaaacagttacttcatttgtatctgtgagttctcgtctttgcatcgctctttcaacgtgcattgcatttggatatacagatcgtattttctccattggctgtaagacagggttttcgtctaataattttacaaatacgtaatcttcacttgctgggtgctgtaataattcatctatttttgcttctactgttcgcattttacgacgtggtgaaagtaaccttttttcaattgctacttcaccagtttcattcagttctacaatgtaataaccttttttatgtttctcttcagaaattgaataggcaagtggtgaacctgaatatcgaatcgtctcattacgtacgaaatgcgcttgatgtaaatgtccaagcgctgtgtaatgaaacttatcaaaataatgactatttacatattcagcaccaccaattgaaagtggtctttctgcatcacttgtattctcctccgcttctcctgaagaagttacaaatgcatgtccaacaaatacatgtctagcttctttatccatcgtttcagagagctcattcataaaaatgcgcatcgcatcatcatgagaacgtacgtcttcatttttcaacacgtgccttactatgcttgggtctgcatacggtattagatggaagtgaacctctccatattcatcatttagtacgacaggttcatacgggaattgaaattgacctgcaatatgtaatccttgttttttcattaaactacttccaaaatggatacgatccggactatcatgattaccagctaccgcaataactggtgtttgtaaatcaataactattttttgcagcacatcatttaataagtctactgcttctgtaggtggaattgctcggtcatataaatcccctgcaataattacagcatctggtttttcttcttcaacagcctgtacaaactgatctaatacaatcttttggtcttcagtcatatacacgccatgaacaagcttacctaaatgccaatccgctgtatgaaataacttcatatttttctactccttttaatttactgattttagtgaaacgagttgatagtttattgtagtttttccgttctcccactctagcttcaatatcgttgcacttccaattctttcttcatttgatttatataaaggcaatatttcttgaactgtaaataagtgataaccatccaatattaattgaaatatattttcttcaatatgtaatcttacttctttttcatttgaaataatttttgtgtgcatctcaaatttcatgatagatacaacccctttttataatctctacattttaatagtatagtggctatgcaagattgacaagtacatacacagcaaagtacacacttttctattgttatatacttcatgtattttatataaaatacggtatgtgaaattttatattttctccaaaataaaaatgcctattatgacacctttatttttgtataaagtctttcattacataatataaaacggtaattaaaacgattgcgacgaaaaatgagaacactgcgacaatgtagccatctttatttaataaaatacagaatgaaatagatattataaaaatcggaaatacgagacgtactttatccttcacttcttctgtcgtatctgtatgatgaaaatactgcgttattcctatcattaaaaaagacaaaataataaccgacaatagtaaaggtcctggcattccgatttctcctttctctatttctaattcagtgtaaaattttttattacaattgtacgatttattttttcttcaaacacacttttagaattgataatgaacatttcacacctatataatagcgcttttatcattataacttcaaataattacacttacagtaatgttgtaatattccccctcagtctctgaaatcctgcaaagataactcgtcaaaatatgcagtgaccaaattaatatttaccgtcaacttttgacaaaatttataaaggacatttcagtacatatcaagaattaagaataagaagatatgtaagggaggatgcattatgactgaacaagttttattttctgttagtgaaaacggcgttgcgacaattactttaaaccgtccaaaagcacttaattctttatcttatgacatgttacaacctatcggacaaaaacttaaagagtgggaacacgatgagcgtattgcacttatcgtgttaaaaggagctggcacaaaaggtttttgtgcaggcggcgacattaaaactctttatgaagcgcgttccaatgaagtggcattgcaacatgcagaacgtttttttgaagaagagtatgaaattgatacatatatttatcaatatacaaaaccgattattgcttgtttagatggaattgtaatgggcggtggtgtcggtcttacaaatggtgcgaagtatcgcattgtaactgagcgtacgaaatgggcaatgccagagatgaatattggcttcttcccagacgtcggagctgcacatttcttaaataaagcgcctggatatacaggacgattcgttgctttaacagcatctattttaaaagcttctgacgtattatttattaatgctgctgattactttatgacatctgattcattaccagagtttcttactgaacttgaaagtgtaaattggcataaagaagatgatgtacatactaatttaaaagaagttattcgtacatttgcaactgctccaaacttagaaagcgagcttgctccttcattagaagtaatcaattcacattttgctttcgatacaatggaagaaatcatccattcattggagaaagatgaaagttcctttgctctaaaaacgaaagaaacactgttatcaaaatcccctatttcactaaaagtaacattaaaacagtttattgatggaaaagataaatccgttgaagaatgtttcgctacggaccttatacttgctaaaaatttcatgagacatgaagatttctttgagggagtacgctccgttgtcgttgataaagatcaaaatccgaattataaatataaacagttaagtgacgtttcagaagaagatgtgaatcgtttctttaacttacttaatgcataaaatgaaattgtcatgaggggatgttttgttcatcccctacctaacttctttgcttcagctaaatcttgtgcggtgaaaatcttactacccgcaaatagcggtataaaatcgaagctatatagtagtgtaattacagctactatatagccttttttatttaattatttttaacaaaatttaattttattaaatccatttttgtgctacactgattttaatcaaatattctaaaaataaaaaggaggggcggctatgatagaaaattatcttcttttcatcattatgtctatttgccttatcattttacctggtccagatacagcaatggctacgaaaaatacattggttgctggtaaagtcggtggagtgaaaacagtgtttggtacatgtattgcactattaattcatactttagctgctgtaattggtctttctgcacttattgtaaagtcagctcttttattttctattttcaagtacgttggggctctatatttaatttatattggtattaaagcccttttagcagtaagaaataaagaaggcattgatacgaacgatatatctttgaataatgaagatgaacacacctcttgctttcgacaagggtttcttacgaatttattaaaccctaaagttgcagtattctttttaacgtttttaccgcaatttttaaatccaaatcataatacgtttatccaactactcgtaatgggccttacttacctcgttttaacagccatttggttcgctttttatatatttttaattgataaaattagtgcttttatgaaaaaaccgaagacgcaacgttatattcaagggctaacaggagtcttcttaattggttttggtattaaacttgcttttgaaaaaagtaattaacaagatgaaaaccaccactattaatagtggtggttttcatttaataactaatttggctgtttattttatattaaaaccagcgctcagttacaacttttttacgtgtatagaattgaacgccatctgtgccatttgtacctaaatcaccaaagaatgacgctttatttcctgcaaatgcgaagaatgccattggtgctggaacatttacgtttacaccgatcataccagcatcgatattatcacggaacgtttgtgcatgtttaccgtttgatgtataaataactgcaccatttgcaaatttagattgatttgttagtttaataccttcttctaaatctttaactcgtacaatgcttaatactggagcaaaaatctcatcttgccaaattttcatttcttgattcacgccatcaaagattgtcgcacctacaaagtaaccttctccaacttcttcattaattttacggccatctactaataaagttgccccatctgctacaccgctattaatgtagcctaaaacgcgctctttatgagattcacggattaatggtccaacatagttctcttcgttaaagccatcgcctacttttaattttttcgtttctgctactaatacatcaatgaattcatcagcaatttcatccactactgctactactgagcatgccatgcagcgctctccactacttgcaaatgcagatccaattacaccttgtactgttttctcaagattgcaatctggcattacaatcgcatggtttttcgcacctgctaacgcttgtacacgttttccgtgtttcgtacctgtttcatatacgtaacgagctaccggctcagagccaacgaacgaaacagcctgaatatctttattttctaaaatgctatttacaacatcttttccgccttgtactaaatttaatacgccttttgggaaacctgcttcatagaataattctacaagtcgctccgctaaaagtggcgttctttcagatgtttttaatacgaatgtattaccgcaagcaattgcaagtgggaacatccataacggaatcatcatcgggaagttaaatggcgtaataccagcaacaactccgattgggtagcgccaaatcgatccatcaattccgctagcgatattcggaagtgcttgacccatcattaaatttggcgtagatgttgcaagttctaccgcttcaataccacgttgcacttcacctgttgcatccgttagcgtcttaccattttctagcgtaatgatttttgcaagctcatctttattttcttgtaatagctgtaaatatttatataaatttcttgaacgatttggaactggtactttagaccatgtttcgaatgctgcttttgccgcttcaacagctttttcaacatcttcttttggagatagtggaacgtaagcgataatttttccagtcgctggatttggaactgcttctacttccgtacctgtcgattcaacccactcaccgttaatgtgattttttactcgtttaatttcagttgtaatcattgtattctctcctttgtataatttatttttgattagaaattaattgctcgctaactttcttatataaagcagccatatcgttttcaccatatccagcttgactcgcttcgtcatatacgtttaataacatttcgcttaccggtaaatggagttcgctttccttagctaagtcaactgcaaatcctaaatcttttttcaataagttcacagtaaatcctggctcgtagttttcaggcgctataaaacttttataattacgttcataaattctactttgaccgtaacttacatttaaaatatcaaacattttatctaaatccatattgttctttttcgctaatgttaaagcttcactcacaccagctgtataaaaaccaattaataagttattaattaacttaacagttgtaccactatcaatctgctcactaacgtggaaaatgttcgcgcctagtacgcccatgatagattccgttttctcatatacctcttttgatccaccaaccataaacgttaatgtacggttttcggctccgattacaccaccgctcacaggtgctgctaaaaagtctactttcttttcctttgcagcttcctctaactgtttgtttaactgcggcgataccgtacttgtatcaatgaaaactacattcgagtgaccattttcaaataatccttctgctccaaaatataccgcttcaacagcgcgaggtgaaggtaaacttgtaaaaactacatcacatgtttctgctagttttgagattgatagaccgataattccgccttctttttcaaaggacgcttccgcctctttatttaagtccacgccatatactgtgtaacctgatttaactagattttttgacattggaaggcccatgttacctaaaccgataaaaccaatctttttcatatcgctttcctcctatttacacaatatatttcccgcgatttataatagctttcgcaatttctctcttcttcgtaaatacgttcgtgtataaaggcactaataattgacggatttcagctaaaatcacatgtctatcttgttcttttgtgacagctgctgaaagtacagaaatcgccgcttcttctactttacggtatccttcttcacaaataacatccgttatgagttgcttcgtacgttctttttcctctccatttttacgtactgcttttctcgtacgtaaaaacgctgattccatgatgtacacgtccgtcaacatatttgatattacacgtgaatattcttgttcttggtcaatttttagacctggagttttagagagcgttttcaaagattgtttcaacaattttttcgctaataaaatgtaacgatggtttctttctacatttgctacattactttctacttcagtgtcttctaattgttcgatttgcttcattaacattttagcaactgttaatctattaatttcgttcgttccttcaaaaatacgactaattcttgcatcacgatataatcgttctacctcatactcttgcatataaccgtaaccaccatgaatttgtacagcttcatctacgatataagcaagtgtttcagaagcatttactttattcagtgcacattcaattgcaaattgggacattttcttcataagatcttcatcgctctcatgaattgcttcatcgattacacctgctgtacgataagctgcactttcggctccatatgtagcaataatcatatttgcaattttctcttgaatcatcgtaaagtctactaattccgtttggaactgttttcgctcttttccatattgaaccgacaaaccaattgcttgttttgctgttccaatatttccaaaagcaagtttaagtctagcaaagttaagaatattaagggctacgtgatgccctttcccaacttcccctaaaacattttcagcagggatgacaacatcttctaaaataagagtcgctgttgaagaacctttaatccccattttcttttcttctaatccaatagatacaccttcacatgttctttcgacaataaacgctgtcattcctttatttgtcttcgcaaaaacaacgtatacatctgccatatgagcatttgtaatccattgcttctcaccatttaacttccaagctgttccctcttcattcaatacggcgcttgtttttgcacttaatgcatccgaaccagcatttggctccgttaaagcataagccccaatccattctcccgatgcgattttcggtaaatatttttctttttgctctttcgttccataatatatgtaaggcaatgtaccgacaccagcgtgtatattaaaagaaacgctaaacgcaccagcgtaccccattttctctgctacaagacctgagacagcctttcctaactcgaacccgccataatcttctggtacctcaatgcctaataatccaagttccccagctttctcaaataattgacgagaaactttatagttatgttgttcaatattctccatttgtggaacaatttcttgtttaacgaattgttctgtcgtttttgcgattaaatcttcatcacctgaaaaatcttctggtgtaaagtaagtatgatttatatctttattaagtgaaaaaaattcatcccatggtaacttcgttttctccatatgtatccccctatcattcggctttcatagctttttgcttatgctcgtctacgatgagtggaatatcttttttgaaaatagaaggcgatgatttttcacatcaagcattttattttgccaaagatgtattttcatcgccttcgctgctttatctattgatcttctgataatactgtttttgcaataccagtatctaactcttcaaagtcatgatatgaaattgtttcgtataattcacttctcgtttgcatattagaaagtgcatctttttgagagcctgtttctttaattaaagtaaacacattttcatacgctttcgctgcaacgcgaagtgaagttacaggataaataaccatttggaagcccatattcgcaaattcctctgcactataatatggagtttttccaaattcagtcatattcgcaagcaaaggtgcatttaccttactattaaatagacggaattcttcctctgattgaagcgcttcagggaaaattgcatctgcacctgcttttacatatgcatttgctctttcaattgcttcatctaatccttcaacgccgcgagcatcagtacgtgctacaatgtataagctcggtgcaacttctttaatcgctttaattttttgaaccaattcttctgtagtaacaagtttcttaccatttaaatgtccacatttttttggtaattgctgatcttcaatttggacagctgctactttcgcttccaccatttctacagctgttctcgccacatttagtacaccaccaaatcctgtatcaatgtcaacaagaacaggtaagtctgtagctcttactaaatctcttgctctctcagccacttcagtagacgtcacgatacctaaatctggtaagcctttacttgcagtataagcagctcctgataaataaagagctgaaaaacctgtattttttgcaactaaagccgccattgcgtcatgagcacctggaatttgcaaaatttcatttgcttctactaaagctcggaatcgattcgcaagctcctcttgtgttgactgctttttcacaacccaagccattctaaattccccctattattaaattaagaatagatctacaaattcgtttacattcatattttctagtttttcttcatttaaacaaacttcatgaatttgttcttgttgcttactagaataatgacctgccatatttgcagtgaatttttgaacaacttttggaattgcttcgtctctacggaagcggtgaccaagtggatattcacattccacattttctgttactgtgccatctttaaagtgaacttgaacagcgttggcgattgagcgcttgttcgggtcaaggtaatctaaactgtactgtttgttttcaacaacaaccatcttattacgtaattcatctacacgtggatcgtttgctactgcatcttcataatcgtctgcaacgatatctccttttaataaaccaattgccgtaatgtattgtaagcaatgatcacgatcagctgggttatttaatggaccttctttatcaataatacgaattgctgattcatgagttgtaattgtaatacggtcaatttcatctaatctctctttaatttccggatgcaacttcactgcacattctgcagccgtttgtgcatggaattctgctggatatgacactttaaataatacattttccattacatatgactctagtggtcttgctaattttaattcttgtttattgaataatacatcttggaatccccatcctggcgcagataatgctgttggataacccatttcaccttttagagcagtcattgcaagatgaacaccgcggctcgttgcgtcacctgcagcccatgatttacgtgagcccgtatttggagcatgacgatatgtacgaagactagaattatcaatccacgcatgtgataatgcattaaagatttcttcacgtgttccgccaagcattttcgcaactactgcagttgttgctacttttacatataatacatggtcaagaccaactctgtttaagctgttttctaaagcaagcacgccttgaatttcatgtgctttaatcatcatttctaatacttcacgtacttttaaagcttcttttccttctgaaatacgaacacggctaatataatctgcaactgctaaaattccgcctaggttatcagatggatgtccccactctgctgcaagccaagtatcgttatagtctaaccaacggatcatacatccgatattaaatgcaccttttactggatctagtacataagacgtacctggtacacgtgtaccatttggcacgattgttcctggcacaactggtcctagtaatttcgtacattctggatattgcagtgctaaaattccacatccaagtgtatcaagtaatacgtaacgagctgtactgaatgcttctgcactagtaacctctttatttaatacataatcggtaatctcttctaataatgcatctttttgcttaatttcatttgttttaatcatgctattctttcctttctgtcgaaaattcgttattattaatgatgggtgtcggtcaaacacccatctggcgggcggcgctaacaactccccagttgttcttatttactaagtacatgtcgctcgccaatataatttacacgtggacggaacaaacgattatttgcatgttgctcaataacgtgcgcacataaccccactgttctagagctaaagaagattggtgtgtaaagttgaattggaatacctagcatccaatatactggagctgcataataatcaagatttggataaattcctttttctttttccataatcttttctccagcttcacacatttcatatagtgtataatcaccttttacatcacataactgttttaaagcttccttcatcataagtgctcttggatccatcttcttcatataaacacggtgtccaaagcccataattttttctttgttatatagtttcttctgtaataactcttcaaatttctcaacattaccagcttctaaaagcatgtacataaccgcttcatttgcaccgccatgtaaacttccttttaaagatgcaactgcacctgttagagcgccgtataaatctgattgtgttgatgcaataacgcgagctgtaaatgtagagtttggcatttcatgctcactatataaaacaagggaacgatcaaagatcttttcctcaagttcagttggttttttaccagttaacatatagaagaaattcgcactataagataattctttaagaggttcaattggctcctcattatttaaaatatgatagctatttgctacaatgtttggcactttacttaacagcttgtaccctcggcttttattcacttctaacgagcggttttcgatatcattatcgtaaccagctaacgctgacacacctgtacgtaatccatccatgggatgcgtctctttaggcaatgcctttagtacgttgaatacaccttctggtactgcatattcttcttttaatttcttttcaagtgttgctttttcatcttcattcggtagatgttcctccaataaaaggtgcacaatgtctaaatactcttttgtttttgagagttcgattaagtcatacccttgaattacaatttcaccttttactgtgtcaagaaacgagattttcgtctccgctgccactataccatctaatcccggggaaaatttctcttcagctttcatcattatttcctccaatcctaatagatcttcgtgcacataactgtaagcctttacaatattgtgaaactacatttctatttcaatgtatcagagtttttagaagatttcaatttattttataatgataagtttcctacacttttcttaatgtaacaatacaattttttgaaaataattcttatattttataaagaaaggatagacttctttgcgtattttcaaaaacaaaatataaagatttttcatataacaccgccaaatatacaattattctaattttatttgagaaatagaaaaaacgagctgtacataaatacagctcgttactatatgatatttatttcactatctcttaaatataatttttatataaaacttattcatttttaataaagttattattttacataattaaattgaatttcttccatttcctcatgataacttacaaataaatcatagttttgaaaataccaaagatcatcacaatctacaaaaaatataataccttccttctcaactgacactatttcgccatcgggtctctcagcaacaacccctaaagaatatccgggctgaattgaactatcccctccgtaccttacagtaaaacgtacagattcaccgtgctttatacgtaattcttcctggaaccattgcagagctttacgatcaattgaaattctcatctttattcctccagtttatgcaaactctttttttcctaatcgttgttttacaaaaaagacgaaaataattaaggctatcaatgctgaaattgcactccctgaaaataaaatacgataaccaaacatttgtgaaacaactccaagtaaaatagcacctaacccgattcctaaatcaaacgctgtaaaaaatgaagcatttgcaactcctcttttactcggatcgacaattgtaagcattgccgcttgcaaagctggctgcgctgaaccaaatccaataccgtataatgttgctgcgataattacacctatcaaaccatttgaaatagttaaaacaactatagctaaaatagtaatacataatgctggaagtatgatgaatacttctccatacttatctaatagtttccctgaaattggtcttacaattgttaatgcaattgcatatacaagaaagaaagttcccggattcacatgaattgatgatgcaaataacggtaaaaaggttgttattcctccatatgcaaacgataaaaagaatactacaatcgtgattgttaatacagatttctcaaatagctgcatcttccctttttctttttgtggtgtaaatggcatcttcgttattaatgataatacgactgccataaaagataacaacgtcgctaataaaaatagaccatcaaatgaataattttgcacaacccatagtccaatcataggtccgatcgccattgcaattgtcatcgccatcccgtaccaacccataccttcaccgcggcgtgaatctggaataatatccgttattgctgttccaacagctgttgtagaaacagcccatgttactccgtgaataacacgtaaaacagctaaaaggacaatagtcgatgctatattataggaatacatcgttaagccaaaaaagatgagtccgaaaataataaaggatcttctaccatattgatctaacattcctccaataatcggtcgtattacaacagcagctattgtaaacatccccatcataagtccaacttgcgattcattgccacctatctctttaataaagagcgggagcgttggaacaagtaaataaaatcctgtaaataaaaataacattgcgaaagtcatttgaataaatgatttcgtccataatcgttccataaaaatacctccatacactcgtaaaatattacgattaacaccttcattgtatattttttttatctcttttccctccgcaaatagacgtatcttttcatattaaatagtccaccatcagcttacattagtcttaagactttgtacgcatgttttaaacaaaagtcctatataatatgtacctttatatgtgtgaaaagaatatactaatttattaactcaacttaggagtgaatatttcatgtgggtattattaagagtaactgccgtagttccttcgactcctgggatacatgttcctgcagttcatacagctagctccgatgtaggaattgaacttcccgcaacttggcagcaatatcaaattcccggtcaagttaccccatcattttggcatcatggtacacaccccagtagtactcccattcatagccatagttatcctccactacctccgactcaagtcttttatcatttcccatcaatttattttcaaaatttttatggtacgtttaacatttaaaacagatcctttcatagctactacatttaaacgaaaaaagcacttaagattgtaaatttcacaaatcttaagtgctttttaatattttttataaatttttcttattgcccattattagcaggtgcctctcctgcattaccaccggtcgctggtggagttgtatttccttgacctcctccgttatttgctggaggtgtcgtatttccttgacctcctccattatttgctggaggtgtcgttccttggccatttccattattttgctcatcttgtttcttttgctcttctagtttcttttgttcttcttgcttcttaagttcctcttgtttcttttgttcttcttgttttttcagttcttcttgtttctttaattcttcttgctttttctcttcttcagttttttgctgttgatcttgttttggttgctccgttgtatccggtacgctagtatttggcgatgaatcacgtttttcaccttttatacgtagctcactaccttcttgaataacgctacttggcattttaaagcgtgatttatctgtagccatttcgctcatcatttctttaaagattaactgtgcaattttcgtgtttttactactaatatactcgtctttaccatctttcatatacccagtccatactgccatcgtatattgcggtgtatatccagcaaaccaactatcacgagttgcactttctggaattttatattgagctaattgctttgatgaatagtttgtcgtacccgttttaccagctacatctaaagagcctacatttgccgatgtaccagtacccgatgtaactacagaacgaagcatatcagtaatcatgtatgcggtagaatctgtcataacttgttttggtttttgtccaaaactttgtgacttaccgtctggataaacaactttcttaacaaaatgcggtttcgtatatttaccttcattaccaaatgccgcataagcacccgctatttcagttggcgatacttcatttgtaccaatagctgtcgattctgtcggtgctgtattaaatgtaatacctagtttctcagagaattcttttgatttactaatccctacttcttttgcagttttaattgcaggaatattacgcgacatttttaatgcttcacgcattgtaattggacccatataacttctatctgcatttcgaacttcttgacccgttgaatacttaaatggagagtcatcgatttgatgatacgtagcccattttaaatattcaattgcaggagcatagtcgaaaatcggcttcatcgttgaaccagctgcacgatctaattcaattgccatattatgccctttaaatacagctttattttctccacggccactacctatagcacgaacttctcctgttttcgtatccataaatgtgaatgcaccttggaatttatcgtttggataatcaatgatattattatttaaaatattatcagcaagtttctgtgctttcggatctaacgttgtataaatttctaaaccgtcagaaccaatattagcatctggcaattctttttctacttctttcacaactgcatccataaatgcagggtatggcattgtttgtagttgagctgcaggcttaagccccttttctacgtcaacttttgatgcttcttccatttcctgttttgttatatatccatgtcggttcattaaacttagaacaacatttcttctttctgttgctttttgaacattttcttttttcgttggatcatagttattcggtgctttcggtaaacctgcaagcatcgcaacttctggtaatgttaagtccttcaattctttaccatagtagttttgtgctgctgttgcgataccatatgaacgattacctaagttaattttatttaagtacatctctaatatttcatgttttgaatactgttgttctagcttataagctaaatatatttcttgcgccttacgctttggtgttttatccatagataagaagtagtttttaataacttgctgcgttatcgtacttccaccttgagagccataatctcctttaagactcactaaaacagcacgggcagtacctttaaagtctactccgctatgctcataaaaacgtgaatcttctgtcgctaaaaatgcattttctactaatttaggtatttgatcatacgtaacattcgtccttttttcttttccatattcatataccaaatccccgtttttatcataaatttttgaggataacggattaacaagttttgctttttccagttttggtgcgtccttaatcattacgaaaaaggtagcaacccccgccactaaacctacaataccaagtaataaacaagtaattaaaaacttgcggaaaaatgatgttttaccttttggtttttgtgttttagaagctggttgttttttctttttaacttgtcgtcgctcctcgcgagaacgataattttctgacatgttactttctcctgcctttcaattctcccgttgatttaattaaaaatattgaggtcactttcgtaaatacgtttaggcaagaaagtgtattgacctggagcattcaatattttcccaattcacagattacaaattttaaaatggctcttatacatactattttcacttctaattttctaataatgctgccccttttagcataataatgaaagaagtgaatttttattacctcgtataaataatatacctttttttcaaatggtcaatattttcttattaataaatcaaaggtgaaataaaaatagcatatcaatatgaacttcgtgtgaacttacttataattacgtataaccaatattaaatatattgaatataggtataatacctctttaattataaagatttcaacaccacaataccgttacctacaaagaattattaaaaatgaaaaataaggagttgcataataatgaagctatctccggttacctcaaaaaatatagttgctgttggttataatcctttttctatgattttgcgaatccaattaaagcatggtatgtatgatttctttaatgtaccagaaagcatttatactggcctattacatgcacaatctaaaagttattatcataatacttacattaaaaattctttccgccacacaaaaatttaaacttaacacccactaaaaaagaaaggaggtgaatcctcctttcttttaaaaacattttacagatgaattatcttcggttcctcttattaatttcatcatatgcttgaatttgttttttcaaacgccgatcagcttttttatcatgcactacaagaattgcatgtataactcctggaacccaaaatattaatgttaatatgaaatttattattgcctgaaatggttttccacaaaacaatacagcaacaggtggaagaaaaattgctaataaatacatcatcccttgaaaactccttattttgtattttatatatcacttttcaaaatatacgcaaaaaaacctactaccattttaatcttaacctgcctctaaaatcaatgtatctccttctatttatataagtatttcagacttttcattgttttctagcctattttcttcctctattgcagttattccaattgcggaaattaacgttcctatcgcttgtatccaaataccaatgagtgcaatgattctctcatccttcttatcaaaaatattatctttattttctttctcatctttcaatacatttaaaacaccttgatacgcttgtaatccagcccctaaactttgcatggagttacccagtataataattttctgtaatacatttatatccaccaaagctgcttctactcctaaaaaagcaccgatcgattgtaaactgttccctgtaatgataagataatcattttctttcaattgttcatttatattaaaatatgttcctattacatttgatatattgcctaatgctaataactcaattcctatctgatcaagtaatttactttgattctctaagcctatattttgattttctcttttttcttccccatcatcatacttgctcgcaatgatttgtaatatatatccgagggcttgtaatgagcttcctacaataacaagatccgattcaactttctcttctccaataaatcctcttgtcgttccaatagcagctgtaagattccctcccacttgaaaccatgcccctgtcacttttaaactgcttggattcatttttatcacctattcaaatattttctaaagctttcaaaacaaacaaatctcacccttaatcttttattttatttttcagatgtaattttgtgaatgatataatgtgctactaatataaaaagcaccttaaaggtgctttttatacgcatgctgggcatgtcaatgaatctccatttttatctattgttatattcaatatatattcaatcgctttatgtgaccaagtttcaggtgtaggcgattcatttatatattgtggcgcacatgacttcagcattggagtattaatactccctccaggatctaaagcaactacagccatgccatggggtaattccagggccatagatttagtgataccttcaattgcaaatttcgaggcacaatatggcgcaagctcagcttcaccttctctcccccaactagaactcatattaatgataattccttctttcctagctaccattgcgggaacaaatgctcttattacatttactacaccattcacgtttacattcattacattttcaaattcttgagccgtaattttccaaagttgtgcattttgatttacaattgatgcattatttattatcagattgggagccgtatgtctattaagtatataatttgcccaattgttaacttgctgagaatctgaaacatcagttacttggaaatcatgtattttactgtactgtttttttagttcttcaattttatcttttgaacgtccacaaccatatatgttccaccctaattcatgaaatcgatcaaccatcgcacgtcctaacccttgtgtcacgcctgtaataattacagatttactaatttcttttcgcttcatttccctcatcctccttccctatatcttactctcttcatttttattcagcgatttactatagtatcaactcaactcatactttagtaatagttttgatattgcatacataaacaaaaaagtaaccatcatggttactttttgctatatatctaaaaattcattgtttatttcattattatttttatatttcaacttctcttttccacatttctcacactggtaaatataaactacacctaatgtaccttttttaaaatcctcattatcctgcatcttaataaaaatatatttatgtttacaatgcgattcacccaaataatttctaaaccactttttcaacacaacacattccacctttatgatagaacctttatttagctgctttattacatactcttatttaaatgttcaatctcatcttgcaattttttaaattgctcaaaatgcatggtaatagattggctactaccataatcaacattttgtttcactaatataacacccgtatcatgaaaaagcgcttcaagttctttcctaatagacactttcgcaatatgagctgttttaattgcagataaaattgcaatttcattaaactttaattttatttcatttggacaaaatgcgtcttcaactaatataacttcattactataaattagtgcaacaagattacttgatttggcatctgttaaatcaacttttttcataatatctttcattacattttgcctcctttattttcatatatatcaattatacaaatttttttaaaaaattactcaactttattatattaattttaacacacttttattgaaatccacgctccaaacgttttactattccacaatttttattgtatgaaccatctgaactataactccatatagtaatgttaacaacttattataaagcaggtgaaaattatgccatcagttgtaggaaatttagttgtacaaaatagcaatggatcatttaacttaggtgatttctacaacgtatctccgaaagaaaatacgaaagcttataatggttccggcgcatcaaacgttggttttgttgttaatacttttagcggtgttagcgcgaccaatacatttgattctgaccttgcagatcaaaaccaagtgggtacagcctaatcttatgttcaactttctgtatagaaaattttaatttgtctatactataatcaggctgtttgacagctcttgtcgattttggagtaccctatctttttctccctttccctggggctcagcagctagcacgaagctagctgctttttcttgtattatttgtctcataaatcagaaataaaagaagctgccatttaatactcagcttcttttacgttatttcaataatatccatagcgttaaatacgtaagttttataaaaagcgtctgtacaaattacaatttgttttaccggattgatatgtacaacagtcatgtagcttgttagtatgtaaccatcttcaaaatatgttaccaatatttctttctcagacagtaatgacgttaataatttatcagaaattctctcttttgcttcatttgttaaaagcggtttttgtacttttaatttctctccaataatctttctcatatttaaaagtcgttcggacattactgtaaacggaacccactctctttcttctttttgtatctttacatcgttcattttttatctccttgatcatttatacatttatttagccatactatcccttagttatttttaatacttactaaactcgaatttacttctaaactataattaggttacttcttaaaagaacattcgttcctattatacacgaacttacgttcttttgagaagagccatacttattatttcttaacaaaaaacataattttatttatctccatacttttttcctttatcaaataaacttctcatttcttatataacatgcatataacaactaaaaggcgacttcacccaaagtgaaatcgcctttttctaaaaaatatttcaaagcttatttttctatcctaactaatgttctttctggaatacataattcatctatattaaaatgatttatttttaagtgtaaatgtcaagataaacatgtacattttcgcttgtttaagcatgtacaaaatccctttgataactaaaaattcttttgtttttcagttgacatactaccgcaggtcttaaaatgtagtataatcattttaccacaaaacacgaacgatggctaaattttttaagtataatgttcgtgttatatagttgtctagatgattggttatgtaaattcaatttgccatttgaaataacattccgtaagatgagagatagagtatatttagagctggaggaaagaaagtggaatttgtatttttaggaactggtgcaggtgttccttcaaaaggaaggaacgtttcagcaattgctttacaattgttagaagaacgaggacaaacttggttatttgattgtggcgaggccacgcaacatcaaatattacatacatctgtacgtccgcgccgcattgaaaaaatatttattacgcatttacatggcgatcatatttttggattgcctggtttattaggtagccgttcatttcaaggaggaactacgcctttaacggtgtatggaccgaaaggaattaaacaatttattgaagtggcattatcggtaagtacgacacatgtgaaatatccacttgaagttgtggagataacagaagaaggtaccgtatttgaagataatgaattttatgtagaaacgaaaagattgtcacacggtatagaatgttttggatatcgtattgtagagagagatatacaaggtgctcttttagttgataagttgcttgagatgggtgtgaaaccaggtccaatctttaaacgtttaaaagatggtgaagcagttgaattagaggatggcacgatattaaatggaaatgagtttatcggcccacctcaaaaaggaagaattattactatcttaggtgatacgcgatattgcgaagcgagtagggagcttgcgcaagatgcagatgtacttgtccatgaagcgactttcgcagcagaagatgagcaacaagcgtatgattattttcattctacatctaagcaagctgcgagcattgcacttcaggcaaatgcgaagcgactaatattaactcacattagttctcgctatcaaggagatacatataaggaattattgaaagaggctagagagttgttttctaatacagaaatagcgacggatttgaaatcattcccagtagaaaaatgataattttataaaaaatggtaacggcgggttaccatttttttttgtctaaaaaaatttaaaaataaaactgttattattttatacttatacttggatgatacagaaaattaggatggtttgaatatataggataaaaatacgaaataatgattatttagaaaaactgttatataagtcagatgacatacaagtgatacaaatagcagaaatggacttttattcagaacttttaaaattcaacaaaagtaagcgttttataaaaaacaagctataatgagggcagattataatttatgataagtcacatgtattttagtcattatcgtaacaagtgaagttgactaaatcatgagagagtaacacgagaattataataggaaagatattactattatttgtcataagtctttttcactttttagctaaacgatatgattagcgagtgtatctattgcaagttccttagttgaagctttttattaataaggtggtggagatttaattggtaggtataccactctttaaaagagttcagaacatcagcaggtagtctaggtggaatagcgggtgcaaatttagttgcattagcaatggttatatcacttgtttatgctatgcttgcaatggcttctgtgttaaactttggattgctaccagactttattgtggattatcttgtatcatttttaaatgaaaataatgctaagattcttatgtattatgataactggtgttatttcaggttatattggattacttttattcaaaaactatccaattcgtatagcagaacaaattcgtggtacaactggaaaagcgacagatgtagcagcttaatagaatagtagaataaatttttttcatagaggtttagggggagttatgatgaagtatcgctcagtatttgatattatcggtccagttatgattggaccatcaagttcacatacagcaggcgcggcaagaatggggcaagttgctcgccagctgtttcgtcatgaaccagaaagagtaagcatttcgttatatggatcatttgcaaagacgtatcgagggcatggtacggatgtagcactaatcggtggaatattaggatttgaaacagatgacttacgtattccagaggcgctagaaatagcaaaagagcgcgaaattgaagtggaattcattgaagaagatgccaatgcacctcatccaaatacagcgagaattcgtttgtataaaggtgaagatgaaattgaagttgttgcttgctcaattggtggcggtaaaattgaagttgtagaattaaacggattcgatcttcaattatcaggcacgagcccagcactacttattgtaaataacgatcgctttggtgctattgcagcggtagcttcaatccttgcgaaacatgagattaacattagtacgatgagtgtatctcgtaaagaaaaaggaagaagagcgcttatggtcatcgaaacagatgaattattagcagatgaagtaattgaagaaataaaagcgcaacaaaatatttgtcaagtaactattatggaataattgcaggggggacacaccatgtttcggaacgcagcggaactagtggcgcaagctaaagaacaaaatgtaaaaatcgcagaaattatgattcaatgtgaaatggaaacaagaagtatttcacgtgaagaagtaattgctggtatggaaaagaacttagtagtgatggagcaagcagtagaacgtggtattcgcggcgtgaaatcaccaactggtttaactggtggagatgctgtaaaagttcaagcgtatatgaagagtggaaaaggcttatctggagatacgattttggatgcagtaagcaaagctgtggcaacaaatgaagtaaacgcagcgatgggaattatttgtgcaacaccaacagcagggtctgctggaacagtgccaggtgtactatttgcactaagagaaaaattgcagcctacacgtgaagaaatgattgaattcttatttacagcaggagctttcggtatggttgttgcgaataacgcttgtatttctggtgcggcaggaggatgccaagctgaagttggttcagcaagtggaatggcggctgcagctgcagttgagatggctggtggaacacaagatcaagcagctacagcaatggcaatttcattaaagaacatgcttggtttagtgtgtgatcctgttgcaggacttgtagaagtaccttgtgtaaaacgtaatgcagcaggagctgcaaatgcgatgatctcagcagatttagcattagctggtgtaacgagtacaattccatgtgatgaagtaattgaggcaatgtttagaatcggacaaacgatgccagtagcacttcgtgaaacagcagaaggtggacttgcagcaacgccaactggtcgtcgcctgcaagaagagatttttgggaagaacaataactaagtgtaaattatagaaaaaggagctcaaataaacttgagctcctttttctatttttcttttgttagttgttctaatgtttttccaagattatgtgatcgtttcgttgcctgtgtaatacaagaaacaagtgcttgttgaaatttatgttcttgtaatacttcaatacctgcctcagtagttccaccaggagaagtaatttcctttcgcaaaatagaagggtgtttgtcacttgcttttaacatttcagcagcaccaatcatcgtttgaagaataagtgattttgcaatatcttcttttaaaccaatttttgttgcagcttcttccatagcttccactacgtaataaatataagcaggtccacttccggataatgcagtgacagcatgcatatcttcttcctctacaacagagacgagaccaatcgtttcaaataaagatgttgcagtgtgaatatgttccgctgttgcatgttttgaaggggagatagcggtagctgattttaaaatggctgcggatgtatttggcattgcacgaataattggaacgtctttttgaagtagttttctaattgagtgagtagaaacacctgctagtaatgaaataataagcacgttattatttatgtattctttaaaaggggtaagcgcctctgcaacatcctttggtttcattgctagaaaaagaatatttgcatcagtaagtaattcttttttattatgagtacctttgacaccgtattttttatgtagctcttgtaatcttgtctcgttagaacgattacttacagtaatttgttcacctttaacgacatttgcatgtaacaagccaccaataatagcttcggcaatagagcctgcaccgagaaaggaaatgttttgaatagacatgatgttcctcctttaattttggttagaaattcttataaatgtacatacattcgtttttttataggaaacacctctttttatctgaaaataatgacaaatatatatagaagttgtaaactgaagaagtattcatttttgaaccggaaagagacaggggggctaagcatgacggcgattcaccgaatggagattcctgtaccatttgcagtggaaactgtgaatgtgtttttagttgagggggagacattaacattaattgatacagggacgaatacagaagaggcaaggaatgcgttagaaagtcaattaggtgcattaggacatacgatagaagatattgaaacagtagtcattacgcatcatcatgcagatcattgtggacttttaaatatattttctgagaagacgaatattattggacatccttggaatgagccttggatcacacaaaatccagaatttttaaagcggtatcatgaattttttagagagacggccttacagtttggtgtgccagcagcatttttgaaagacgagtcgttattgacgacgaggacacttaaatattcttgtaatagatcgttaacgcatactgtgagagaaggagatcgtattgattctttgcctggatttatagtacttgaaacaccaggtcatgcttctactcatatttctttatatagagaatctgatggaatattaattggtggagatgctctcatcagtcatatttcttcgaatccaatactagaaccaccatatgaagggcaaacagaacgggcacgcccattactacaatataatcaaacattacagcgtttaagcgaaatgaatatttcacgcattttatcagggcatggggaagatgttctaaatgtgaaacaacttattgaaacgagattacaaaagcaagaaacacgtgcttttaaagtgcttgagttattaaaggaaaaaccaatgacagcatttgaagtatgtgtaaaactatttccggtattatataaagaacaattaccacttactatttcagaaacggttggacaattggactatttagcatataatcaacaagtgatgattgatgaatcatcgcaacaattgatttattatgcaaagtaggtgacagcaatgacaggacgtttacaaaataaagtaatcgtcattacaggtgcttctagtgggattggtgagcaagttgcaatgcaagttgcagcacagggagcgactcccgtattaatggctcgaacagaagagaaactacaagcgttagtagacaaaattaaagaaacttataatacgccttgctattattatgtattagatgtaagtgaagagatggaagtacagtctgttttttcaaaggtattacaagaagtaggacgtattgatatattagtaaacaatgcgggatttggtatttttaaaacgtttgaagatgcgtcaatggatgaagtaaaagatatgttccaagtaaatgtatttggattagtagcatgtacgaaagcggtactaccttatatggtaaacaagaacgaaggacatattattaatattgcttcccttgccggaaaaattgcaactccgaaatcaagtgcgtatgcagcaacgaaacatgctgtattaggatttacgaatagtttacgcatggaattagcgaatacagatatttatgttacagcaattaatccaggtccgatagatacaaacttttttgaaatagcggatcaatctggtacctatgtaaagaatatgggacgttacatgttaaaaccaacatacgtagcagaacaaatcgtaaagtcgatgcacacgaaaaaacgtgaagtaaacttaccgaagtggatgggaattggaccgaaactttatgctttattcccaggtttatttgaacgtgtagcaggtaaatcattaagtaaaaaataggaggtttccatatggaaatctcctatttttttattttccagtcacataatcgtaaacgatatcctcaactgcctcgtatacatcaatttcagtatttgaatgaattatcgtttgaatatgtttaattagcatttcctgatcttcttttgatattggactgcattgatattgctgaaaactttttataatcattttctcaattaatttttcgttcatattttttcccgcctgtatgtacgtatgtattgttttattgtacttgaagtgaaataaaaaaactaccatgcactatttttgtataaaaattcggttgtgtgtaatgtttttctagtaaaattaagtttttttacttttaaaaatttataaatatttaattgactctataaatatacaatattataatcatacttaatttaaagaatcgatttgaggaggaacttatgaaagtcgcaattattggagccactggatatgggggcattgagttaattcgtttattagaacaacatccatatttttctatagcatctcttcattctttttcacaagttggtgagtgtataacaaatgtatatccgcatcttcgaaatgtcctcgttcatacgttacaagaaattgatgtggagacaatagggaaagaagcagaaatcgtatttctagcaacaccagcaggagtatcggcggagttaactcccaagttattagcagaaggtttaaaagtaattgacctatctggagactttcgtatgatagatccttcgtcatatgaactgtggtataaaaggccagcagcgaaagaagaaattcttagaaaagcagtgtatgggttaagtgaatggaaaaggactaagattcaaaaggcaaatttaattgcaaacccaggatgttttgctacagccacattgctagcgatagcaccgttagtacgtagtagcaggattgaagaagattcgattattattgacgcgaaatcaggggtatcaggagcaggtaaaacaccaacaacaatgactcattttcctgagctatacgataacttacacatctataaagtaaaccagcatcagcacgttccagagattgagcaaatgcttacagaatggaatagtgagttacagccaattacatttagcacacatttaataccgatatcacgaggaatcatgattacactttatgcaaaagtaaaacaaaagatggaaataaagcaacttcaaaaattgtatgaagaaacgtatgaacaatcgcctttcatccgaatttgtacgcaagggaaatttccaagtccaaaagaagtgagaggctcaaattattgtgatattggcatagcttacgatgaaagaacagaaatagttacggtcgtttctgttatagacaatatgatgaaaggcgcggctgggcaagcgattcaaaatgcaaacataatagcgggactagaagagacaacaggtttacaacatatgccgctttatctataagggggacatgatgattaaagtagcgtctattacaaaattagaaaatggttcaattgtaacgccgaaaggcttttcggcaattggtactgcaaatggtctgaaaaaggatttaggggcaatcgtttgtgacgtaccagcatcatgtgccgctgtgtatacaacgaatcaaatacaagcagcccctttgcaagtaacgaaggatagtataacggcagaagggaagttacaagcaattatcgttaatagtggaaatgcaaatgcttgtactggaatgaaaggattacaagacgcatacgagatgcgcacattaggggcggaacattttggattgaaagaaaattacgttgcagtagcttcaacaggtgtaattggtgttccgctaccgatggatataatccgaaagggagttgcaactcttataccgacgaaggaagaaagtgaagcatattctttttctgaagcaattttaacgacggatctcataacgaaagaaacttgctatgaaatgattattgatgggaagaaagtgacgattgcgggtgttgcaaaaggttcagggatgattcatccgaatatggcaacgatgcttagttttattacgacagatgctcatatagagcatgacgtattgcaaacggcattatcccaaattacgaatcatacatttaatcaaattacggtagatggagatacttctacgaatgatatggtcatcgttatggcaagtggattatcagaaacaaggccgataaatatggaacatacagattgggaaactttcgtatgtgctttacagaaggtatgtgaagatttagcaaaaaaaattgcgcaagatggtgaaggcgctacgaagttaatagaagtaaatgtgctaggagctcaaacgaatgaagaggcaaaaaaaattgcaaagcaaatagtcggttcgagtcttgtgaaaacagcaatacatggtgaagacccaaactggggacgaattattagcagtattggacaaagtgaagtagctattagtccgaatacaattgacattactcttcaatctatattggtattaaaaaatagtgagcctcaaacattttctgaagaagaaatgaaagagagattacaagaagatgaaatagtcattaatgtgtacttacacttaggagaagagacaggatcagcttggggctgtgacttaagctatgaatatgtgaaaataaacgcttgttatcgtacataaggagagagaagatgagcgaatatattgtagtgaaatgcggcggtagtatgttgaatcaattaaaagctgtgttttttgaatgtataaagaaattgcaacagaagtataaagtagtgattgttcatggtggtgggccagaaattgatgccaaattaaaagattgtaacatcaacgtagaaaaaagagatggattacgcgtaacaccaaaagaagttatggatgttgttcaaatggtgctatgcggaagtacgaataaaaaactcgtaatgaatttacaaaagcataatttacttgcggtaggttgttcaggatgtgacggcaatttacttcaagttcaacctgtcagtgaagagataggatatgtgggggaagtaagttatgtagaaacagccttattaaaaggattaatgaatatggagtatattcctgttattgctccaatcggggtaaatggtaatgaagtttataacataaatgcggacaatgctgcagctgggattgcggctgcgttaggggcaaaagagcttatttttattacggatgtagatggaatattacatgaagggaatttggtaaaggaaacggatgaatctgaaattgctacttttatagaaacaggtgttattacaggtgggatgattccgaaagtacaggcggcactagcatcattaaaaatgggagtgcaaaagataagtattgtgaatggtacaaaagattttactgaggttacgggagagtgtattggaacgacggtaacgaaaggtgtgagtattgcatgacgagtcatctttttcaaacgtatggcagaagaactattgagtttgtaaagggaactggaacgaaagttattgataataacggtaaggaatatttagatttcacatcaggaattggcgtatgtaatttaggacattgtcaccctactgttctcaaaggtgtacaagagcaacttgatgatatatggcatatatctaacctgtttacaaacagcttgcaagaagaagttgcgtcattattaacagaaaatagagaattagattatgtgtttttctgtaatagtggggcagaggcaaatgaagcggctttaaagttagcacgtaagcatactggaaaatctctcgtcgtaacatgccagcagtcttttcacggtagaacatttggaacgatgagtgcaacgggccaagataaggtaaaagaaggatttggtccattacttccatcttttttacatatcccttttaacgatattaaagcattagaggaagtaatgaatgaagaagttgcggcggtaatggtagaagttgttcaaggagagggaggagtaatacttgctgatctatcttttttgaaagagattgaaacattatgtaataagttcggttccttatttattatagacgaagtacaaacggggataggaagaactggaacactattcgcttatgaacaagtgggaatagagcctgatatcgttaccgttgcaaaggcgcttgggaatgggattcctgtcggagcgatgattggccggaaagagctcggagcgtcgtttactgcaggatcacacggttcaacttttggcgggaattacatcgcgatggctgcagcgaaagaagtattgcaagtaagtgaaaaaccatcgtttttaaaagaagtacaagaaaaaggcgagtacgtattagagaagttgcaagaggaattacagcatgtcgaatgtattcaaaatatacgtggtaaggggcttatgattgggattgagtgtaagcatgaagttgcaagttttatagaacaactagaaaacgaaggacttctcgtattacaagcaggtcctaatgtgataagactattaccgccactcattgtcacgaatgaagagttagaacaggcagtatatataataaaaaaagtagtttgtacaaaaaacgtatcaatcatataagggggaagtttcatgtcaactgtacaagtaccgaaattaaatacgaaagatcttttaacactagaagaattaacgaaagaagaaattatttctttaattgagttcgctatatatttaaaaaagaataagcaagagcctttattacaaggcaaaatattagggcttatttttgataagcattcaactcgtactcgtgtatcttttgaagcaggaatggtacagctcgggggacatggtatgtttttaagtgggaaagagatgcaaatgggaagaggagaaagcgtttcagatactgcgaaagtattatcgcagtatattgacgggatcatgatacgtacattctcacacgcggatgtagaagagcttgcaaaagaatcgagtattcctgttattaacggtttaacggatgatcaccatccttgtcaagcattggcagaccttatgacgatatacgaagaaacaaatacatttaaaggaataaaattggcttacgtaggtgacggaaataatgtatgtcattcattgttgctagcgagtgcaaaagtcggaatgcatatgactgtggcaacgcctgtagggtatgaaccgaatgaagagattgtaaaaaaagcgttagcaattgccaaggaaacaggagctgaaattgaagttttgcatgatcctgaattagcggtgaatgaagcagatttcatttatactgacgtttggatgagcatggggcaagagggcgaagaagagaagtatactttatttcaaccttaccaaatcaataacgaacttgttaagcatgcgaagcaaacatatcgtttcttacactgtttacctgcccatcgtgaagaagaagtaacaggagaaattatagatggaccgcagtctatcgtctttgagcaagctggtaatcgattgcatgctcaaaaagcgttattagtgagtttatttaaaaatgtagaagagccttcctaaaagggaggtttttttatattaaaatgtcggatgtatatttggttaaccatttcgatatcatttataataaaagagaaaactaaatttgtttttcagagtgtgtaaggacatactacatataaaaatatagttaaagagatgatgagggtgaaaacaactaagaaaacatattcgtttttccagcggatgtggagaatattaaagtttcaatattataagttgcttcgatcgccagaaggcgcaaagaaagtatcgttagggtttgctataggattcggcttagaaatgttagtcatttatacggcatcgctcgtatatgtaatattttatccaatcgtcaggttagcaaagggatcttttcctgcggcagttattggcaatattattgggaaaatatcgtttctcccagtatttttatttccgcttgcgtatgcgctaggaaaaatgatttatccatttcatgtacagaaaattcatcatgaaccatttacgatatcggacttgttttcaagtcacatttttacgatattaaagagcttattacaaagtgaagtgtatgtattaattggaatgacgattttaggagttgtgtttggtctcatttcatatttcgttgtgcattatttatacgaaaagaaccgtaagttacgtttgaagaaaaggaagaaacgagtgagagaaccacttgtacaattataaacaatgtcacattcattttctcctttgaatatgtttaagaaaaaggaggagaggataatgtattattattacgtacctcaagtatatccatatgtaaattattatccggtttatgatacgagtagacaatacgaattatatcggcaacaacaattacagcaattatcacaaataccacaattaccaacacaacagcctacacaggaaaaaaaaccatatttaacaacatggccatattccaatgtatactatggtaattattacgaatcataaagctgcttctatttagaagcagctttatacgtttgttttcaaaattaaattttgaatggtttgaagagaatgaatgagcttttcgcgctcttcctcagataatgtttggaaattttcttttagtttgtctaaaatgaattgctgatactgatttactaataatttcccttcagctgttagagaaattaaaatgacccgtcgatctttttcgctataatgacgctctattagttcttcttgaataagtttgtttaatagaggtgtcatgttaggccgtgaaatcgctagccgcttgccgatttcggaaactgctaatgtgccgttttcatgcaaaagcagtaatacttgtgtatgtgatggcggcatatgtctttgagaagaaaattctccaggaagcataaatttgcgataaaaaagaggcactagcgaaagaagatgatcaacaatacgttcccactcgcgtgattccatataaaggcccccttccactatcattgtaacaaaaaagacatgttataaaaatagaattgtttcatggtcgctttaatatttgtaggataacacttgctttgtaaatgtattggcaataattgcatagccgttatcatttgggtgtacttggtcaaataataactcttttttatcatttgatattaatttgcgaattggtaaaacgatagatggttgatttgctttggaaatggaataaacagattcattccagccatctaaaaacatatctgcataacttgcgatggagtcatcgagttgtaacgggttatagagttctgagagaatgagtaaagcgtccggattttgatctcgaactgtctttacaatactttttatatccgcttcaaaatgggctttttctttatttaacatttttataccatctataacaccaacatcacgatttaaacgaaataaattatttcctccaatattaattgtaattatatttgctgctctaattttttcctttacatcttctgattgaacttttttagcgagacgatctgttgtaagaccgtttaccccaaggttttctactgtaattggtttatgaatttgtgcttctatttgcttagaagctaattcagcaaatccaccttgtgtcgatccatatcctttagcgagtgaatcacctaatacaagatgataaaaagattcgtttgtttgcttatcaatccaatttggggcagatgttttttctgttttttcttcagattcattttgttttgtctcgtcgttcttttcaaaataagaataagaaatgatcagaaggaggagacaaacaattgttaagatgacttttttcataaattcatcctccttgtaattggtaattgtatcatattcagcagtattagcaatgtaagggcatattatatgtttatgaaaagtttataataactttacagaaaatttgttgaagtttgtcaaaaaatattgacgataggaaagaactttatatatgataatgtcagataaggtgaaactttaatgagtgggagctttatttcctattaattgttagtcttcatcaatcgggcgtttaaggggactactcgttagcgcaggatgaaatgaaaattgtgtctctaatagaagaaaaaaggtatgtggttagagacagatagggattcatttcattatttctggtaattgtataagggggattttttgtgaaaaagtcaaaaaaaatgctggctggagcaactcttgcgattggtgttatagcaccgcaagtaatgccagcaacagctcatgcagatgagaacactggggagagtacagttaacttacgaattctagaaacatcagatattcacgttaacttaatgaattacgattattatcaaacgaaaacagataataaagtaggtctcgtacaaacggcaacactcgttaataaagcacgtgaagaagtgaagaactctgtcctatttgatgatggggatgcattacaagggacaccgcttggagattatgtagcaaataaaataaaagatcagaagaatcgtgtggatcctagttatacacatccattatatcgtgtaatgaatttaatgaagtatgacgtcatctctcttgggaatcatgaatttaactacggtttagattatttaaataaagtgattgaaaaaacggatttcccggttattaactcgaatgtctatatagatgaccatgatggtaatgatgagaatgacgagcattactttgataaaccatatcatattttagagaaagaagtagtggatgaagcaggccaaaaacaaatagtgaagattggtgtaatgggatttgttccaccacaaattatgaattgggataaagcgaatttagaaggaaaagtaaaggcaaaagatattgtgcaaacagcgaaaaaattagttccggaaatgaaggcgcaaggtgcggatattatagttgcactagcgcattcaggtgttgataagagtggatacaacgaaggaatggaaaattcatcgttttatttagcgacagaagttcctggcgtagatgcagtattaatgggacattcacatactgaagtgaaggatgtatttaatggtgttccagttgtaatgcctggtgtctttggaagtaacttaggtattattgatatgcaattgaaaaaggtaaacggaaaatgggaagtacaaaaagaccaatctaagccacaacttcgcccgattgctaatagtaaaggtaccccattagtagaatctgatcaaaaattagttaatgaaattaaagatgagcatcaagcgacaatcgactatgtaaatacacctgtaggtaaaacgaaagcaccaattaatagttatttttcattagtacaagatgatccttccgtacaaattgtgacaaatgcgcaaaaatggtatgtagaacaagaacttaaaaaaccagagtacgaagagattaaagatattccggttttatctgcaggcgcaccatttaaagcaggtggccgaaacggtgctacatattatacggatattccagctggaacgttagcaattaaaaacgttgcagatttatacgtgtatccaaatacgttatatgctgtaaaagtaaatggggcacaagtgaaagaatggcttgaaatgtctgcaggtcagtttaatcaaattgatccaaagaaaacagaagaacagccgttagtaaatataggctatcctacatataactttgatattttagatggcttaaaatacgaaattgatgtaacacaaccagcgaaatacgataaagatggaaaagttgtaaatgcaaatacgaatcgtattgtaaatatgacatatgaaggtaagccagtagctgatgatcaaaagttcatcgtcgctacaaataactatcgtggaagtagtcaaacgttcccaggtgtaagtaaaggggaggttgtataccaatcacaagatgaaacacgtcaaatcattgtgaagtatatgcaaaaaataaaaaatattgatccagcagctgatcaaaattggacgtttaaaccgattgttgcagataaattaaatacaacatttgattcttcaccaaatgcacaaaagtatataaagaaagatgggaacatatcatatgttggaccatctgaaaatgaatttgctaaatatgcaattgatataacgaagaaaaatgatgataaagaaactggtgaaggaaatccaacgacaccgccaacaggtgggggagaaaatccaacaacaccgccaacaggtaatggagaaaacccaacaccaccaacagaagaaggtaataatggtaatgaaccaaaacaagatggaaacaatactggatctggacaaactacaacagatgatcaaaatacaaaagaaacaacaacaactgtaagtgaaaataaagaagctgaaaaagatgaacgtgatttaccgaaaacaggtgcaagtattgcttctacaattggagcgggtcttgcgtttgttggagcgggattacttatgttatttagaagaaagaaagcgaatagatagtcgagaaatataaaaaggattaccgatttggtaatcctttttattatattatgaaactggtactgctttttcttttttccatgaaagaccgaatccagtaaagccgacgataatggttacgactggacatgctaaacagaagattgcgtatggcaggtaatcgaatgttggaacgctaagaacgtttgttaagaatacgccacttacaccccatggtacgagtggattaattactgtaccagcatcttctaatactcgtgataaattacgacgttctaaaccgacttcatcgtatttattagcaaatgcttgtcctgttaaaacgatggataagtactgctcaccgagtaagaagtttacaccaattgcagttgaagcagtagaaataattaagcgtgtactagtttttacgaagctagagataatattcatcagctgcgctataatacccattccttgtaataatcctcccatacaaagagctaggaaaataagagcaattgacatcatcatactttgcaggccaccgcgagataataagctatcaatatctttgataccagttttagaaacgtaaccgtcttgcataatttttattaaatcagctaaagaagtgctaggtttaaaaataaagagaataataatccctaccacaattcctgcaagtaatgttggaactgcgggtacctttttaaatgcgaataggaacagtaataaaataggaatcagtgtaacgatagaaatcgttgcatttttttctaatgtgttaataaatgctgagaaatcaacgtttccaccagatccgcttcctaaaatgaaaaatgcgataaaagcaataatgaaagctggcactgttgtccaaagcatgttacgaatatgttcaaataaatctacacccgttacagcaggcgctaagtttgttgtatcagataaaggagacattttatctccgaagaatgccccagaaataattgccccagcaataagagctggatcgtatccaagggcagtacccattcccataaaggcaagtcctacagttgcagcagttgtaaatgcactaccgatactcgttccaacaattgcacaaacaacaaaaacagttggaacgaaaatttttggagatacaagttggaagccgtataccattaaagttggaatagttccagctgcgatccaaatgctaattaatacgcctacaagtaagaaaataaatatagatggaataccagctgaaatactacttatcattcctttttccatagtagaccaatcaatttttttcataaatccaaacgctaataaaagaacgatgccaaataaaatcgggatgtgtggtgaaacttctaatttgataacactaaagccaatgcagaaaaagataaaaattgttaaaagaacagactcaatttttgaaaccattgttttcccctcctaagtaatgtgaaatagctcttttttatataaaattcgccaatattgtatatttccttctaaaatttagaattttgtgacaaattaccggtaattgttagttcttctatatgatgcggaaatgattggataaaaaaacgtccctgcatataattatgcagggacgaagaaatcgcggtaccaccctagcttgtgaaatgaatgtatcacaaaataaagggtcatatgatatgcgcttataaaataaaaaacgcccctgcaatatatgcagggacgaaaaattcgcggtaccaccctaaattgtgaaacagtgtcgtttcaccactctttagacataacggtctataaccgtccttcactactcctcacgtttcgtaaaagaagctccagggggtaattcataattcgctctgtactggttcgcaccgaccaccagctctctgaaatcagaaatcgaaatactactaaatcctatcaacgccgattcatatgatgttagttaaatttttatcatattttcatcttacatgtcaataaaaatattaaatgtttttttagggaaataaaggataattgtttttaacgctgtaaaaatgtacgttataatgaatttgaaagggggaggaaagagtgaagaaaaaaataattctttttaccactttattagttattggaggaagtgctggaatttacacagcttttgcggctgaatcagagcagttgaaacaaaagcaaatacaacagtcagaagtgaagaaagcgaaagaagctgaagagaagaaatcaatggaaaaagcagcagagaaactaggagtttctactgaggggaaaacaaaagaagaggttacgaaagaagtaaataccgctaggtttgataagcgtcatgatttattaattgagcacgctaaacaacttggaattgatacagaggggaaaaaagatgaagaaattattttagaaattggaaagatacagcatggaaagtagaacaacttatcatatgataagttgttcttttttaagaactatttgattttaaaataattgacagtcattcagatttaatgttaactatatttataaacaagttaacattaggggtgacaattgtgacaataaatagtaaaacgattgaaaaatcatcttatacatatgaagaattagcagagaaaaataaagcttacgtatggcacccatttacacaaatgaaagattatttagaagaagatcctgtcattattgaacgtggagagggaagaaagctatacgatgtaaatggtaatgaatattgggatggtgtttcatctatatggttaaatgttcacggacatcaagtaccggaattagatgaagcaattcgtgagcaattaaataaaattgctcattctactatgttaggacttgctaatgttccatctattttattagcagaaaaaattattgaggttgtaccagatggattgaagaaggtattctattctgattcaggttctaccgctgttgaaattgcaattaagatggctttccaatattggcagcataaagggaaaccaaagaaacaaagattcgttacattaaaagaagcatatcacggtgatacaattggagctgtttcggtaggagcaatagacttgtttcaccaagtgtatagttcgctcttatttgatgcgattaaaatgccgtatccatatacatatcgttctccttacggaaataataaggaggaaattgtaaaaagccatttagaagaaatggaagaattgttgaaagaaaagcatgaagaagtagctgccatcattgtagagccattaatgcaaggtgctggcgggatgattacaatgccaaaaggatatttaaaaggactgcgcgatttatgtactaagtacaatgtattatttattacagatgaggtagcgactggatttgggcgtactgggaaaatgtttgcatgtgaacatgaaaatgtgacgccagacattttaactgctgggaaaggtttaacaggtggatatttaccaattgcagttacggtaacgacggatgaaatatataatgccttcttaggagaatatgaagaacaaaaaacatttttccatggacatagctacacaggcaatccgttagggtgtgccgtagcaatcgcgaatctagaactatatgaaaaaacaaatttaatagaagaagtggcacgtaaaacggattatgtggcagcgcaattagaaaagctctttgcgtataaacatgtaggtgatattcgtcagtgcggattaatggttggtattgagcttgtgaagaataaggaaacgaaagaagcgttcgactggacagaaagagtcggtgttcaagtatgtaaacgctcaagagagctgggtatgattttgcgcccgctcggcaacacgattgtatttatgcctcctcttgcttctacaattgatgagattgacgatatgttacgtattttatataaagcaatctcggatgttacggagggagaataatgagcggtttttttataacagcaacagatactgaagttggaaaaactgtagttacaggtgcattagcaggtgtatttagagaacttgggtataacgtaggggtgtataaaccgttgcaaagtgggcatgttgcatcaaaccctgagggagatgcggcaaggttaaaagcattatcaggtgtaccgacacaagaaaatgaaatttgcccttattctattgaagaaccacttgctccgagacttgccatgaaaagagctggaagagtagtaaagttaaaagaaattactgattactataatgaactattaaaagagtttaatagcttatttgtagaaggggcaggtgggcttgctgtcccatatacagaagatgctttagtaattgattttgcaaaagaattacagttgcctcttattgtagtagctcgtcctacattaggaacagtaaatcatacagtgttaacgattgcttacgcaaaggcgcatggcttaaccgtagcgggtgtcattttgtcaggttgcaaagaatgtgaaatggaaagagtgcaagaaaataaagagatgattgaagagctgagcggggtaccagttttaggattattaccattctttgaaggtgagtttacgaaagaagaagtattagaatctgcaaaagaacatattatgatttcaaaattagaggagtttatccaaaatgaatcaaacgtggcgggcgcaccttcaatctaaattacaacaattacatgagcaagggcagtatcgtgatttgcatgtaacagagaaggcagaagagacttggcttattcgagataaaaaaaagatgttaaatttagcgtcaaataattatttagggttagctggagatgaaaggttaaaagaagctgctattgcctgtacaaaaagatatggaactggagcgactgcctctcgtctcgttgtaggaaatcatccattatatgaagaggttgagagaagcatatgtgactggaaaggtactgaaagagctttaattgtaaatagtgggtatacggcaaatataggtgccatatcttctttggcctctcggcacgatattgtttttagtgataagttaaatcatgcaagtattgttgatggaatcctattaagcggggcagagcataaaaggtatcgtcataatgatttggatcatttagagaagctgttgaaaatggcttcgcctgaaaaaaggaaattaatcgtaacagataccgtttttagtatggatggtgatactgtgtatttaagagatttagtacagctgaaagagaaatacggggcaatcattatagtcgatgaagcacatgcgagtggaatatatggaatcggcggagctgggttatctcatatagaaaaaaatcttgctcaaaaaattgatatacatatggggacgtttagcaaggctttagggtgttatggtgcgtatttgacaggtgatgaaatttatatagagtatttacaaaatatgatgagaagctttatttttactacagctttaccaccaagtacgttaggagcagtgcaaaaagcaattgaaattgtaaaagaagataacgaaagaagagagaaccttatagcaaacggagaatacttcagaactaaattaagggatgctggttttgatattgggaatagttcaactcatattgtaccgattgtagtcggttcaaatgaacatgctttacgatttagtaaaaggttgcaagaggcagggattgcggccattgcaattcgtccgccaactgtgccggttcatagttctcgaattcgctttgcagttacatcgcaacatacaatagctgatttaaaatgggctattgatcgaattattcacattgcgaaagaagaggagattttcgtatgaacgagctaaagattatttttatccccggatggggaatggaagagaatatttgggatttagtacttccgtattttaaaggatatcctgttgaatgcatagattggcataatgtgaaagaacgaagtgaatttgcggaacgaattatagatgtagcgcataacgacaacgtaattttagttggatggtcactaggagcgttagcagcagttgaagcttataaaaagattcaggcaaaaggcatcgtattaattggtgggaccgctaaatttacaaatacgagtgactatagtaatggatggaatgctttgcatgtagaacggctgaaaaggaatttggtgagaaggaaagaagatacgctcaagcggttttatgaaaatatgtttacgaaagatgagctaaaagagaacaaaaattttgaagacattgtagaccattttaaaggtgattctattcagtctttacaactaggtttggattatttaatagaaacagatatgagagaagaactaaaagaaattaaagtacctatactacttatccacggagaacaggatgtaatatgcccattgtctgcggcacgtagtatgacggagaatagcagcagcgagctgaaagtagtaagtgaagcagggcatgcattatgtgtaacgaattttgaatattgcgcaaatgagataattcaatttgtagaggggatacgacatgatcaacaaaacgttactacaaaaacggtttaatggggcagccgtatcttacgatcgatatgcaaatgtacaaaaaaagatggcacattcattactttcaatcttaaaggaacgatatagtgaaacggcatcaatacgtattttagaactgggatgcgggacggggtatgtaacagaacaattatcaaagttatttccgaaagcacatattacagcagttgattttgctgaaagtatgattgcgattgcgcaaactagacaaaatgtaaaaaatgtaacgtttcactgtgaagatattgagcaattacgattagaagaatcatatgatgtcattatttcaaatgctacatttcaatggttaaataatttacaacaagtgttaagaaatttatttcaacatttttctatagatgggatattactcttttcaacgtttggacatgaaacatttcaagaattgcatgcttcgttccaacgtgcgaaagaagaaagaaatataaaaaatgaaatatcgattggtcaacgtttttattcaaaagatcagttgcttcatatatgtaagatagaaacaggggatgtgcatgtttctgaaacatgttacatagagagttttacagaagttaaggagtttctgcattctattcgaaaagtaggagcaactaatagcaatgaaggatcatattgtcaaagtccctcactctttcgtgcgatgctacgcatatacgaaagagacttcacgggaaatgaagggataatggcaacgtatcatgctttatttatacatataacaaaagaggggaagagatgaaatgaaacaagtacaaacaaaaagggattggaaaaaacttgcatacgacgtagtggaagagaaaatgattacgaaagaagatgcaatagcgatattagaagctgatgatacagaagttttagaaattatgaatgcagcttacattattcgccatcatcactttggtaagaaagtaaaattgaatatgattattaatacgaaatctggattatgtcctgaagattgtggatattgctcacagtctattatttcagaagcaccgattgataaatatgcatggttaacgcaggagaagattgtagaaggggcacatgaagcaatacgccgtaaagcaggtacatattgtattgtagcgtctggtcgtcgtccgacggataaagaggtaaatcacgtaattggagcagttaaggaaattcgtgaaacgacagacttgaagatttgttgttgtttaggtttcttaaatgaagatcaagcaggacgtttagcggaagcaggcgtgcaccgttataaccacaacttaaatacacatgcaaataattacgatagcatttgttcaactcatacgtatgatgatcgtgttgatacagttcaaaaagcaaaacaagctggtatttcaccatgctctggagcgatttttggcatgggagaaacaattgaagagcgtgctgaaattgcatttgaattacaacgtatagatgcagattctatcccttgtaatttccttgttgctgtaaaggggacacctcttgaagggcaaaaagagttaacgccagtagaatgtttaaaagtacttgcaatgatgcgttttgtaaacccaacaaaagaaattcgtatttcaggaggacgtgaaatcaatttacgttctgtacagccaatcggtttatttgcagcaaattctatttttgtcggggactacttaacgacagctggacaagagccgactgcggactggggtatgattgcagatttaggatttgagattgaagaatgtgcattataagatagatgaaaaagcaaacttgtaaaagagtttgcttttttgtaaataaaatgtaataaatagttgtgaacgcttgatactattggtttttgaacgaaaaaaagaatttttgtggacgaattttccaagccctagttgtacatagtaaatatgtaatttatattgggttggaggattttacatgtacaaatacatattagcgattatgacttgtttaattttaataaaagcaataagttctgatccagttaaggctaccgaaaatcctgaacaaaaagagatgcaacaaagaatcgaacaacactttcgaacgaaagctgaacattttggattgaaaacggaaggaaaagatttaaaggaagttagaaaagaaattactattatagaagaagcgaaaaaaagagagaatgtatggagaacagcgcaagctcttcatataaaaacagaaggaaaaacgatgaatgaattaataaaagatgtacaaaaaaaggtgaaaaaataaaaagaggccgcagcctctttttttatgcccattgttttgataagtgagccatttcaattgcagcaacagctgattcatatcctttattaccagctttcgtacctgcgcgttcaatcgcttgttcaattgtttctgtcgttaatacgccgaaaataactgggatgtccatttgtagtgataaagacgcaacaccttttgctacctcattacaaacgtaatcgtagtgagttgtagcacctcggattacagtacctaatgtaataacagcatcatactttccgctactagccatctttttagcgattaaaggaatttcaaatgcaccaggaacccaagcaacatcaatatcactttcttctacaccgtgacgctttaatccgtctaaagctccgccaagtaacttacttgtaataaattcgttaaaacgtccaacaacaactccaacttttaatcctgtaccaactaaatgaccttcgaataccataataaatctctcctttaattataagtttagtaagtgtcctaatttatttactttcgtttgtaaatacgatttattctcttcttttgccggcatttgcaacggtacacgctcgactacttctaaatcgtaaccttgtaagccagcaatttttcttgggttattcgttaataatcgtaagctttgtaaacctaaatcttttaatatttgagcaccgataccgtaatcacgaagatcagcagggaagccgagtttttcatttgcttctacagtatcgaatccttcttcttgtaatttataagcgcgaagcttattaagaagcccaatgcctcttccttcttgtctcatataaagaagaacaccttttccttcacgctcaatttgagcaagtgctgcatggagttgtggtccgcaatcgcagcgatgtgaaccgaatacatctcctgttaagcattcagaatgaacacgtacaagtaccggttcacctgttgaaatatcaccttttacaagtgcgatatgttctttcgtatctaatgagttagaatagccaattgcgtggaaagtaccgaaatctgtaggtaatgtaatttccacttctctcgtcacaagtgtttcatgatggcggcgataagcaattaaatcttctattgtaatcaattttatatcaaattgttttgcacattctattaaatcaggtacacgtgccatcgtgccgtcctcatttataatttcgcaaataactccagctggttcggcaccgcatagctttgctaaatcaacagcagcttctgtatgacctgcacgacgcaggacaccgccttctttcgcaattaatggaaagatatgtccaggtcgattgaaatcagcgccttttgatgcggggtttaacaattcttgtatcgtagttgcacgttcgtgagcgctaatccctgttgttgtagaaacatggtcaatgctcactgtaaacgcagtatgatgtgaatctgtattatgagataccattggttctaattgtagacgttccgcgtaccctgctgtaatcggtacacaaacgagaccacggccatgtgtaatcataaaattaattgtttctggtgtaatgtactctgctaaagcaataaaatcgccttcattttctcggttttcatcatcacatacgataacgactttaccttgttttaaatcttctagagcttcttcaatacgatgaaacattgtgcttcccccttatagaaatccgttttcttgtaaaaagctttcagtcattgaacctactcgttttgtaggtttagtaataaagcgttcgatatatttaccaatcatgtcacactcaatgtttacgatatctccggcatttttttctccaatgacagattcgcttactgtgtgcgggatgagtgaaatcgttatggaagattcgtctatagcaaatatcgttaaactcgttccatcaacagcaatggaccctttctgcaaacaatagcgcagcagttcatcagaaattgctattttgtaatagacggcattgtaatgttgttttttatttaaaatcgttccgatgccatcaatatgtcctgaaacgaaatgtccaccgaatcgtccgtttgcagccattgctcgttctaaatttactttagagtgtggtttaagtatacgaagtgatgtcgactgcatcgtttcgggcattgcatcaactgtaaatgaagtagttgtaaagtttgttacagttaagcaaataccgttaaccgcgatactatcacctaagtgaacatctgataaaattttctttgcatgaatcgttaatttcatcgcttctccactttgttgcatgtttgctatcgttcctaattcttctacaattcctgtaaacatttcgtcacctcgtttcgggcattcgcaacgatttttatatcatcaccaatttgtttcatctcttgaattttcaaggaaagcgcatcttgtaattttgaaaaaccatttcctccaaataaagtaggagcatctttcccaccaattaatttcgggcttatataggttacaatttcattaaaattgtttgtttttaagaaacttgcatgaatcgattggccaccttcaacgaatagagaaagaatttgtttctctccaagaaaggaaagaaggtcctcgatttctatatgcttcgtttccatttggaatatagctatatttttagattcataagaagatatcttctctttctttacatccttaccgacaataatccatgtcggtgctaaaccatctgttataacatgagaagatggtggcgttcgtaaatgggtatctaaaacaacgcgaataggatgtttcccaccatttggaattcttgttgttaaatgaggattatcagctataactgtattcactccaacaagaattgcatcatgtgtatggcgatattggtgaacatcagcacgtgcttcttcacctgtaatccacttactttcaccagttacagttgctgtttttccatctaagctcagcgctgttttgattgttacaaaagggcgtttcgttttcatgtagtgaaaaaagtagcgatttaataaaactgcttctgcttcaagaacaccagtagttacttcaattctagcttcctctaatcttctttttccgttaccagaaacgagcggattacaatcgagagtagcaattacaacacgcttaactcctttttcgatgagcaattcacagcaaggtggtgtttttccaaagtggctacacggttccagtgttacataaacggtagcgtctttggcgttctgaccagccatttgaagggcatgaacttctgcgtgttcttcaccagctcgtaaatgagcgcccataccaacgatgtttccatcttttacaacaacagcaccaaccataggatttggacttgtttgtcctgatgttccttctgctaactgcagggcaatcctcatatattcttgatctgtcattttcttcacctctccaaaaaaaatcaaaaaaccccaaggatttaatatccttggggtttgggagacgtgatttctagaaatatagtttgaatacgaaagcataggaaagaaacctaacgataattgatatttctgcataaggaaaaaacctagcaaaatatcgaatttttaaacgctagttgtctctttttatttcagtataaaaaataagtatagaaaattaaacatatataaagaatcaaaatgaatctttaaaaatatgcatactgaaataaaagtgtattcactatataaaaaactagaaacatatccttctcccatccagactatactgtcggccctagagtttcactagatccaccgttttcgagttgaaaacgggtcacggacttagaagttttcacttcatcaccgccggttgggaatttcacccgaccccgaaggatgctgtttgctcaaattatagcacaaaaaaaataaaaggctagtaaaaaatattcgaatgtgaagaattgtgtgaaaatatatgcaggctggaatggaaataaaagtattagaaatgttgtaaagagaagggatataacggagttgctaaaaagaaaaaacatgcacaaaaaaatgtgcatgtcacatgtaaaattattctgcctctggtgctctaacaacagactcgaatttacctttatgcgaagcgtcgcaataaggcatattttttgataaaccacaacggcataaagaaaatgccggttttgctgggaatgcattcccttgtgagtcgactaattccacgtcccctgtaacgcgaaaagagccattatcatttactttaatttgtacttttgccaacgttatccctccttcccaaacgcttaatttcatcatataatcaagggaagtgcttggcaatataaagtgaaactttaattagtgggggaggcatcccccactaattattagttgaaccaatcgggcttttaggggcagttaatctcctacctaacttctttgtttcagccgaattttgaggtgggagttttactgcccgcaaatagcggagaaaaaagagcactttgtttgagaaagaagagagtgttataatagttttcataactgactagagtaaggtgacgagagatggataaacaattacatacattacgaaacattgcaaatgagcgcacgtgggcatcatttttgaatgataatcatccatatagtttgttacattggtccattgcaggtgtagggcaagaggcaaaggatgtttggttactgcaagatgaagtaacatttcaaacgacagaattcccaacgttagatgatgcaatgcaatggatttctgaaaatatggaacaagttacagacgttttagcgcaataaaaaacaggcttatgcaagcctgttttttgtttctttcacatatgtgtttaaaaattgatcgacggctgcttcgtactcttctttattttcgttataagagcaagcgtgtgcaccgtgttctgcaatataaagctgcttattattttctttcgcttcatataacgcttttgtcatatcagctaaaatatagtcgtcatctttactatgaataaagagaacgggattgttaatgttttttatacagtcgattggtgaaacttcacgaattgtataaccgtcacgaactttcaaaaatgcgtttgctaaaggtaataaaggccattttggtaaatggaattcaacctttaaacggtgctgtaattgtccgtgaaaatcagagaaaggacaatctgcaatatagaaatcagcaccatcttctacaagtcctgcgtattgaagaagtgttgcagctcccatagattcaccatgaataccaagtgtaatattggtgccaaaacggttttttagccagtcaactacggattttaaatcatgtttttcatagtatccatagcttgttgtttttccgccagttttaccatgacgacgatgatcgtaaatgaggacgttatatcctctttttaagaataagtttgcatattttacagagtttattttatttacagttacaccgtggcaaaaaaccataaacttattggtggaatgaccagcaggaatgtaatatccgtgaaggtcgtatccaaattgtgaagggatatgaatttcttctttatgaagagcatcaaaatcctctatacgaaaatgttttttcgtttctctttcgagtacttcttcctctgtttttttctttaagtacatcactttatttgtaaagaaaatcccaagggcagttattgcacctagtatagtaaacagtgctgcaaaaaaacgtttcatactttacctcatcctccaaataccgttacatgtgatacacttatattgtatcacaatgatataaaaggggagaaataggaaatgctgcatatacaaaaaattacgccagcgatgaaagaaacaatccgaatgttcatgtgtgagaactggggaagttcattgatggtttcacgtggtaagggacatcagttagaagagttgccaggatttgttgcgctctcagatgacagaataatcggaattataacgtatgaagtgaccagaaatatgtgcgaaattgtatcgctagatagctttgaagaaagaaaaggaatagggacgaaacttgtggattgtgtattacaagttgcagaaggagaacggtgcagacaggtttggcttattacaactaatgataatatgaatgcgttacgattttaccaaaaacgtaattttgtaatgactaatttatatgtgaatgcggtagaggaggcacgaaaaataaagaaagaaattccacgtattggatatgataatatcccgattttacatgaaattcagttggagtatcgtttagtgaaatgatgtaacaattttcagaaatatgagttgttaatcttgacggatagtttaatttaggttaccgtaaaattgtaatctattaccatattaaggggtgacgatgtggcaactatacgtgatgttgcaaaattggcaggtgtttcagtcgcaaccgtttcacgagttattaatgaaaaaggatacgttcatgaggacacagtaaaacaagtaaaggaagcaattgaagaattacgttataggccaaacagtgcagcgaagccactatttaaagaggattcaacgataattgcattacttgtagataatttatgtaaccaatcaaacatcactttgctacattgtattgaggaaatagcatataaagaaggttatcaaatcattatttgtaatatagagaataaagatagatacatacatatgctgaagcaaaataacattgcaggtgttattttgacaagagcagtttttaaaagtgtaggaaaaattccatttccgtttgttgtgatcgatgagcaacaatcacatggaaattattatgaaagtggacagagagctgtttctttattaaaagagaaagggtgtcactttcttgcatatttcggtgagggagaagaaagtgaagaaatggaagatcatatagcagggtttttagacgctgtttgggatgaaggaatctcttatcgagaagaatgtgtacaagggtatacaaataaacaatttattacattattgcaaaacaatccgtatgtagatggaattgtagcctcaagtgatcagattgctattgatttaattcggtcagcgagatttctaaatatacatataccagataaattaaaaattgttggaccgaatgggagcatagagtgtgaatggagaggttcatcactaccgacaatagaaagctatgtcagagataatggaaaagtagcttttcaacaattaaaaggaaaaataaaaaagtaaaaggtgcgttttatacgcacctttttataatgtaattgcggcaataaagccaaatataagtaacggtatattgtaatgtagaaaagtgggtacacatgtatcccatatatgatggtgctgaccatcagcatttaaaccggatgttggtccaagtgtactatccgatgctggagatcctgcgtcacctagcgctccggctgtaccgataattgcaattgtggccattggactaaatccaagctgaatgcaaagaggtacaaaaatggttgttaagatagggatggttgaaaaggatgaaccaattcccatcgtaacgagaagtccaataacgagcataagaaatgcagcgagtggtttgttatttccgattatatgtgcactcgtttgcactagagattcaacatgtcctgtttttcgaagaacagcgccgaatccggcggcagcaatcataacaaagccaataaaggacatcatacgcattccgcttgttaatatcgcatctgcttctttaagtggtagactgccactaactgataagacgataatacctgctaaagcaccaaaaatcattgattctgttgttaattgaacagttaatgtagcaatgatagataataacccgaaagtaatgctacgttttgtatagggaacgatttcattttcggtagtatgaatttgttctgtttcatacgtacgaggttttcggtacgtaatgaataccgctacacataatccaataatcataccgattgctggaatagtcattgcttttggaataagtgcgacatcaaatgtaagaccgctttgcgcagcgttggtttgcaatacgtcatgataaatttttccgaaccctgcagggatccacatataaggagtaatcaatccaaatgtaataatacatgtgacaagtctgcgatccactttcagctcagttaatacttttaaaagtgctggaattaagatggggatgaaagcaatgtgaacaggaatcacattttgtgagaaacaagccatcattaaaataatgaataaaataagtaccttagaataaacttgttttttcgtgtcttgttcattgccaatccattttaatgcagtttgaatcatagcatctggaagtcctgttttggaaagggaaatagcgaaaccaccaagcattgcataacttaaagcgattggagcactgtttccaagaccagttgtaaaagtgttaatcgtttctgaaataccgagtccgccgataagtccgcctgttaaagctccaacaatgatggcgacaatgacctggacacgtaacaaactaagcaatagcataattgctactgcgacgagtacagcgttcataataaatgtaatctccctaaatttttattctgttaagacaagtacatatgaaacattttgctatgtttatacatacttgcgacatattattataaaatgttttctatgaaatgtaaaagagccttttgtgactaatgctgaaaagctagctcttgtttaattgattgcaaagaattggcgaataattctggttcttctagatcaggagaatgtgctgagtttgggaaccaaatcatcttttttataggcgcttcaataatatcgcaatattcctgaacgagtgcataaggggtttgataatcatagcgaccagaacaaaaataaactggaatagataaacttgagatagaagaaaagaaatcgattgtcagcatttcttcccataaaacgccagattttaaatttcctgcgagaaacttgaaccaatctaatagcgtgtactcaggagaaaagaaaccttttcgtatgaaagaaaaggaagatccattttggattgcgcctccgaatgtgccaagccactttctttgaataatgagacgtctcgtatctaaaaatggtggctttcctaattttaaaagggaagctaatgcttttttatgattatgtttttttgcagaacgaattaaatgttgatatagcaattcttcattttgtttcatatgtacaatttgcccaataccgatgtaagcctcaatatactttggatattgatgtgctatgttaagcccaatgatacttccccaagaatgaccagcgagaaatagtttttgtttgttgaaccttttaagtacatattgaatcacttcttttgcatcggaaacgaattgttcgattgtgaaatttgctccgaaatcttttattgaaaaggatttaccagccccgcgctgatcccaattaataacaataaattgcttctctaattctttttgaaaatggcgaataaatccgatttgtgccatcccaggtccgccgtgacagcataataaaataggttgctctacgttttgtccacgcataaggagagtttgttttcgattattaatcataacgctttctatcgtagcgatactgttaggaatgagttgtttgttttcattatagaactgaggggtgtagctacgaaaaagcatattgaaaacctccttttgtgaaatcgtatgaatcgcacaggctattcattttgcatatactgttagaaaatcattgtaacataccatactagtgtcatttcaacacgggaggagggaaattgtgacgattggagaaattatagatggtttaaatagacgtgaacccatcgctattatagcaaaacgtcttgaaataagcccgtatacattatcgaagaaattaagattgattggatacgaatatgatggagagcagaagaaacgtatttttgtaggagatggagaagaaccacgtcacttacaactccaagaagcgaccgcccttcaatatgagaaaacagattatcaattgttaatttatgagcaattacaaagcatttatgaattattaagaaaaagagaagaagtaattgtaccaattatgagtaaaagtgcagagaagaagagacgaaccttttctattaatacagaaatattatcacaattggaccttatatcagaatcgaaaggaattcaaaaatctaaacttgtagaagaggcgttgcaccaatttttacagcaatatgaagttgacaaaacatcacattttgataactaaagaaaaggatactatgttcattggaagaacgagtatcctttttatgatgtatattacgtataaaatagaggatcagtataaatcctttatggcgtgaaaaatgaaatttattattagagaaacacttaatttactttttgaattcttccatcaataactggctgaattggttcttttaattgttttacgtaatcgactaacgcttcaaagtcgtttggaccagtttctgcatttttaccatttttaaatgatacgaatccgtcaccgccagaagctaagaaggcatttgcaactacgctatacattttagatggagataattcttctccgtttgttaaacgtatatttgtaactttttcaccgtttggtttatttgcatcccacgtatattgaatacctgaaatttgaagcattcttgttgttcctttttgccattgctgatttaaaatatcgcgaatgtcttgacctgttaaatctactttaattaattgatttccaaaaggttgaatgccgtataactcaccccacgtaatatcaccagcatctaagtcattacgaatgccaccaggattcatgagggcgatttgagtttgcatcgtttgacgctgagcatcggcaactaaatttccaagagtggactcaccagcatcattttgtttacggtcgataggtgctgtagattttccgactacttcatttacaagtggtgcaattttttctttatattgatctagttttttctttacttgtttatcaggttctacaccttcatgatagggtgtaacaacttcagcttttttctttacaatatcctttgttttacgatcaattgttacatccacgtctgagaaagccgttccgtatgaatttgcttggacaattagtttattatttactgtaccatttacatacgtatgactatgtccaccgaaaataacatcaacttctgggtctgtttcatttgcaattcgagtaagatcgccatttgttaccccagactcatcggttgttccaccgacatgagcaagaacgacgatagatttaacgccgagacgttttaattgttgtgttgatttattaattgcttctacttcatcagtaatttgtacattgttaagcatcgtaggcataacgacatttggtgtatcagttgtaacaaccccaatgaatcctacaggaacaccatctaccatttttacagtaaacggtggtaaaaataagcggccagttgatttgttgtagaagttagcagctacataggggaagttagcccctttgaaattccctgttttttcatgatatccaccgtaaatgaggcgttgcatttcatcaataccttcatcaaattcatggtttccgattgtaccgacatcaaattttaagtcatttaaaaattcaattgtcggttcatcttgtaataatgctgaaactggtggactagctccgacgatatcaccagcatgtacgagaagtgtattagggttttgttttttacgttcttttaaataagtagctaagtaatcagcgccaccagcttctttattattgatttttttaacagtatctagttgtccatggaaatcattaataccaagcatttgtacgtctatgtagcggttttgttcagctggattctgagatgggggagcggcaaatacgcttgaaaaagtaatggtgcttaaaacagcaacggcaggaataatttttttccacataatataattctcctttttttataatctgacatcatacgacataattttaatagattcataggattatagctacataaaaatttagtcttttcgaaaaattaacatatttacaaaaagtgaataatagagtgaagacctttttttattgtcgatttcatcgtgtatctactataatggagaaaaaagtaaaaggtgagtagcatgaagaaaaagaaacaaagacaaatacaaagacaatcacaagtgaatcaaccgaagaaagaaacacttacattaggcgatcaattaaatgattcactcatgcaacaattaaagagtaagaagaaagagttgcaagtgagggaagaggaaaaagaggcagctgaactggaaagaaagcgccaagaacaaaaagaacgtgaaaagaataaatcatttgaagaactgctaagtgaaagtaaccttacttggaaagactttaaataataaaaaatgatcagtggtatttcactgatcattttttgacgagcttgtaagaaaaggggagttagaatgagaaaaattatcgttgttccacatgaaaaccattggagtgaaaaatttcaaatggaggctgaaagattaaaaacagcgatgccagaaacggtgaaaattcatcatattggaagtacgtcagtgcccggactggcagctaaacctattattgatatgatcatggaagtagaaaatatcgaaagagtagatgggtggaatgaacgatttatagagcttggttacatcgtaaaaggggaaaatggtatttcaagacgccgatattttattcatggaactgaagaaaaacgttcgtatcatttacacgtgtttgaaaaaggaaatccagagattgtaaggcatttagcgtttcgtgattatatgatggctcattgtgaagaagcagaggcatatgcaaccttaaagagagaattagccgaaaagtatacatatgatggcacgttatatacggaagggaaaaatgagtttgtgcgcaatgtggatgaaaaagcgaaagaatggagagaaaataacttaaatgaatgagttcacgttattttttagctatataaaagtgttatgtaaactgtacgtatgttttgacttttgggatgaatcttgttgaaataaagttgtggcttataaaaaatgtaacaatgaaagggagacgactgtgcatattccaacaactacacttcataatggcgtgaaaatgccgatgattggtctaggcgtatataaagcgaaagaaggagacgaagtaaagcaagcagtaaaaacagcgttagaagttggataccgttcgattgatacagcaactgtatatgaaaatgaaagcggtgtcggagaggcgatacgtgaatcaggaattccaagagaagatatatttataacaacaaaagtatggaacgacgatcaaggatatgaggagacactcgaggcgtttgaaaagagtttgaaaaaattacaaatggactatgtagatttatatttaatacattggccggtaagagggaagtatgttgatacgtaccgagctttggagaaattgtatgaagaaggtaaagtgcgcgcgattggtgtttctaattttcataaacatcatttagaactattattaccaaattgcaaagtgaagccgatggtaaaccaagtggaacttcatccgatgttgacgcaatttgagttgcgcaattattgtcaagatgagcaaattcaaatggaagcatggagtccgttaatgaggggcggagaagtattccagcatccaatcattcaggctattgctaacaaatatgaaaaaacacctgcacaagttatattaaggtgggatattcaaatcggaattgttacaattcctaaatctgttacaccatctcgtattgaagaaaactttactatttttgattttgcactaactgaagaagagatacgtcaaattaacacgttgaatcgtgatttacatgtaggaacgaatcctgataaatatgatacgttataaaaaagactgtctcctaatactggagacagtcttctgtttatcggtaattcgatatttttaacgatgcaaagcatatgtgtcatatttaacaatcttttgaagttgtatatattcttctttcgttaaaggtaactgttggctagctcgtatattttcctgtaattgttgaagcgagcttgcaccaggtataacagctgcaacagtcttattatgtaagcaatattgaatagctgttcctgttaaagagcgttctccaatcgtttcttttacactcgctagagttgtatgtaattcatcgtaagaataagagagataatccttttcctttactctttctatttttattgcattgttgtcagttaaaattccttttgcaagtggcccgcgggcaatgacgctaatttggtgttcattcagaaggggaaaccattcttctggacgacgatttaaaaggctatattccattagtacactaacgatgtttgagcgttttgcatactcacgaacgacatttgggcgtatagaagaaataccataatggcgaataataccttcctttttcaattcttcaaaagcttcaattgtttcatctattggatcttcaatcgttcccccatgaagttggtaaagatcaatataatcagtttgaagtctacgtaaactttcctttacttcagtttttatgtaagctttagaaggatcccaagaccagccatttttttcttctgtccaacgatttccaactttcgttgtaagaacaatttggtctcttcttcccttcaaggcttttccaacaaattcttcatttaatccgtaatcatataaatctgctgtatcaaaaaaattaattcctaaatcgattgcttcatcgataatatgcatagcttctgtttcagatgtaccgagagacatacagccaaggcccatttctgtaacaaacaaatctgagtttcctaattgacgttttttcataggtcaacctccttacctttattgtacgagagggaaaagaggttgacaaacgtttacttttcgtttcgcattaactgcccgtaaaagcatgattaatgtttcactttatttgctgtaatccactcttgtacagttgcatactctttgctatattgctttagcttatggcgaatttgccatgcttttccgactaaagtgacgcgatttggtaaaatataaactttcatttctatcacgctcctttcaatgtggtaaaatgtatgaggaaagaataggaaatagaacagggagatgaagtagtatgagtaatcttgcagagagaacagtaaaaactgagccgatttttgatggtagagttataaaagttcgtgttgatgatgtagtattaccaaatggagcaatgagtaaacgtgaaattgtaaatcaccctggtgcagttgctattattgctattactgatgaggggaaaattgtgcttgttgagcagtatcgtaaagcgcttgaaaaggcgattatagaaattccggctggtaagttagaacctggtgaaaaacctgaggtaacagcagttcgtgaattagaagaggaaacaggatatgtatgtgaaaatatggagctcattacttctttctatacatctccaggattcgcagatgaaattttatatgtatataaagcgacaggtttgacaaaaaaagaaaataaagctgagttagatgaagatgagtttgtggaattaatggaagtatcgttagaagaagcgattactcttatgaaagatcttcgtattcatgatgcgaagacgatgtttgcagtacaatatttacaactacaaaaataaacactcgccaaaggcgagtgttttttaattgatttttgcatatacacgtgcatcacgtaagctaccatctggtgctaggaaatcattttccattgtaccttctagaatgaattctagacgttctgctaagctacatgcatttatatttgttgcatcagtacgaatttcaattcttctagcgcctagtttatcaaaggcgaactgaattgcacctttaacagcttcggtcatatagccttgttttgtataggcactatgtagccagaagtgaagtgaaaactttggaatatcccagttttcaggctgtagtgtaattgctccgatgaatgtaccagatactttatcgtataagtgaaaatcaagtgtttcacgaagtaaaaactgtccgtgagcttcgcgaacaatttcttcagcactctcttctgtttcagcgttaattggtatccacggtactaagtcttctagagaagcttggattgcttcatatacttctgcaccatcacctggaaatggtttacgaacttgcaagcgttcagtttgaaataatgttggaaaatctaataataatggtttcaagagaaatccctcctattctctactttttagtttagcaaagtagagcggaatttcaatgttaattcgtcatacttttttctttctttcatacatttttaataagagtgtgaacggagggaaggaaaatgtggcgaaaaaattggcaagaccgtgtaatgtctcacatacaggaaaactcttcattatatatatttaacgccgttttattattgatgggagtaatattcggagctattctggtgaatagtttacaaatcaatcaaaaacaagatttatcattttatttacaacgtttttttggacaagtctctaaaggagaatttgccattgcgggcgaaatgtttcgagaaagttacttttcgcaattaaaatacatcggatttatttggattttagggatttcaattattggattaccacttatttttattttattatttgtaaaaggagttgtcgttggatttacagttggttttttagtaagtcagcatggatggaatggattattattagcatttgtatccgttttgccacaaaatttaattatcattccagtctttctcgttatgacaactattgctgcaagtttttctttacggatgattaggcatcaatttattagaaaaataaccgagccactattaccattattaatccgttatacatgcttctttctcgtaattggagtggtgttagcacttgcttctagtgtggaggcttacgcatcaccagttttaatgaaagaagtcgttgaggctattaataaaaaataaatactttttgagaataattatcaatttgtttttattgtttttttcttttgacagaagcccttcttctgatataatggtgtaagagtggcgaggagggagtagtaccgaatggaagaaagaattgaacgaattaagaagcaattacatgcagcgagctacaaattaacaccgcaacgtgaagcaacagttcgtgtgctgctagaaaatgaagaagatcatttaagcgcagaagatgtttacctccttgtaaaagaaaagtcgccagagatcggattagcaaccgtctatcgaactttagaactattatctgagttaaaagttgtcgataagattaacttcggagacggtgtttcacgctatgacttacgccaagaaggtgcgcagcgtttccaccatcatttgatttgtacacaatgtggtgctgtacaagaaatacaagaagatttacttggtgaagtggaaaggaaagtagaacgagactggagctttaaggtgaaagatcatcgtttaacattccatgggatttgtaaaaattgtcaagaaaatgaaacggatgaaaaataaccttttcctatttatctaggaagaggttttttatttgaataaggtataaattggtgaaagcttggcatatgttgtaataacttatattttggaggaatttacaatgcgccgagctttaaaattaacttttgatggaataaaagtatttttattatttacaagttgtacgattttgttttatttcgctatactatggataaatgaagaatatgaaagctatcatcgttatgaaaaacctaaagaagagactgtagaaaaagtatcagggaatgaagaaccggcaaaggatgctttcgtaaatagaatgatgtttttctatgaaaatggggagtagtgtagagtggaagatcaattaaaagattttattcattatatggttgtcgaaaaaggattagcaaagaatacagtagtatcttatgaacgggatttaaaaagctacgtaaagtatttgcaaaatgtggaacagacgaaaacttttcatgaagtgacccgtttacacattgttaattttttgcagtatttaaaagagaacggaaaatcttcgaaaacattggcgcgtcatatcgcatcaattcgttcgttccaccaatttttacttcgtgaacgagcggtagaacacgacccatccgtacatattgaaacgccacaaggggaacggaaattaccaaaagtattatcagttgatgaagtagaggcgttacttcaaacaccaaaaatgacaagtgcttttgggattcgtgataaggcgatgctagagttactgtatgcgacaggacttcgtgtttcagaattgattgcactcaatttagaagatgtacatttaacgatgggatttgttcgttgcatagggaaagggaataaagaaagaattattccactaggaagtttagcaacggaagcgattcaaaagtatattgaaaaaggaagaagagaattaatggggaaaaaagtagtagatgcactctttttaaaccatcatggtaatcgtttatcaagacaaggattttggaaaatattaaaacgattagcgaaagaagcaaatattgaaaaagagcttacacctcatacgttgcgtcactcgtttgctacgcacttattagaaaatggagcagatttacgtgctgtacaagaaatgcttggacatgcagatatttcaacgactcaaatctatacgcacgtttcaaaaactagattaaaagatgtatataaacagtttcatccgagagcatagttactatgctctttttttcatagattaagaggggaagaccgcttcacagaaacttcacaaacatttcgtatattgttttcagcagaagactggaatattacaatgtatttcctctatactaaatagagtataaaggaggaaatgatgatgaaaaaactgattataactttatttatcgcgatgctagcgttggctggctgtaatacaaacaaagaagaaccgaaaaaagaaaagaaacttgaaagtgtaaacgtagcaattcaaacgaatccgaaagaaattaaacctggtgaaaaaacagaagtacaagcacttgttacacaaggaaaagaaagagtaaccgatgccgatgatgtaaagtttgaaatttggaaagatggcgacgagaagcacgagatgttagatggtaagcataaaggaaaaggtgtttatgcagtagagaaaacatttgaaactgacggagtatatcatattattcctcatacaaatgcacgtgatatgcacgttatgccagaacataaagttgctgtaggaaatgcgaaagtagaagatgcaaaaaaagaaaatagtgaccacagtgcaggacatggagatcataaaagtgacacaatgatccatcttatggctggagacataaaggcaaatgctgaatctacaatgaaagttcatttaaagcaaaaagaagaagcattaactggtgctgaagtacaactagagatttggaaagatggtgttgaaaaacacgaatttattccagcgaaagaagggaataaaggagagtatgaaacgaaacatactttcaaagagaacggtgcttacaaagtgaaagtacatgtaagaaaaggcgaattgcatgaacataaagaagaaacaatagaagtaaaataaaaagtagctctttagagctactttttatttttaatatgaagaaataaatcataaaaaaattagcacttcgttgcagaatggattacaatagaagtgtgaagaaaatgagaaattctacgaaaatgtattaaaaagaaagcgtaaacatgttatgatatcagtatcagatgtctgacatctgacttagaaaaaactagaaatgtttttgaatcgtttcaagtaaacgaaataggttagaaaatgatttaaagaagtactgtttgacaatgagaattctttttgataacagtttcactttatagcgttttgaacatactacaagaagtagaactgaacttataggagggcgcagttatgaataaatataaacgtatattcctagtcgtaatggactctgtgggaatcggtgaagcaccagatgctgagcaatttggtgatttaggatctgacacaattggtcacattgctgaacatatgaatgggttacaaatgcctaacatggtgaaattaggtcttggtaacattcgagaaatgaaaggtatctctaaagtagagaaaccacttggatattacacaaaaatgcaagagaaatctactggtaaagatacaatgacaggtcactgggaaatcatgggcctttacattgatacaccattccaagtgttcccggaaggattcccgaaagaattacttgatgaattagaagaaaaaacaggccgtaaaattatcggtaataagccagcttctggaactgagattcttgatgaacttggtcaagagcaaatggaaacaggctctttaatcgtttatacttctgctgatagcgtattgcaaattgcagcacacgaagaagtagtgccacttgatgagttatataaaatctgtaaaattgcacgtgaattaacattagatgagaaatacatggtaggtcgtgttattgctcgtccattcgttggtgaacctggaaactttacacgtacaccaaaccgtcatgactatgcattaaaaccattcggccgtacagtaatgaatgaattaaaagatagtgactacgatgtaattgctatcggtaaaatctctgatatttatgatggtgaaggggtaactgaatcacttcgtacgaagtctaacatggatggaatggataagcttgtagatacattaaatatggactttacaggtcttagcttcttaaacttagttgactttgatgcattattcggccatcgccgtgatccacaaggatacggagaagctctgcaagaatatgatgcacgtcttccagaagtattcgcaaaactaaaagaagatgatctattattaattacagcagaccacggtaatgatccaattcaccctggtactgaccatacacgtgaatatgtaccattattggcatatagcccaagcatgaaagaaggcggacaagaattaccacttcgtcaaacatttgctgatattggtgcaacagtagcagaaaacttcggtgtgaaaatgccagaatacggaacaagcttcttaaacgagctaaagaaatagggggataaacaaatgaatcgtgaacttattacaaaatcagcttcatacttaaaagagaaatttcaagagacaccacaagtaggactaatccttggatcaggactaggtgtattagcagacgaaattgagaacgcagtaacagtaccttacagtgaaatccctgaattcccagtatcaactgtagaaggccatgcaggtcaactagtatttggtacacttcaaggtgtaacagtagtagcaatgcaaggacgtttccacttctatgaaggatacgacatgcaaaaagtaacattcccagttcgtgttatgaaagaactaggtgtagaaacagttgttgtaacaaacgcagctggtggtgtaaatacatcatttgagccaggcgatcttatgttaatttcagaccacattaacttcatgggtacgaatccattaatcggaccaaatgattctgaaatgggcgtacgtttccctgatatgtctacgtcatatacggtagaacttcgcgaaatggcgaaacaagttgcagcagacttaaatattaaagtacaagaaggtgtatacgtaggaatgacaggtcctgtatatgaaacacctgctgaaattcgtatgcttcgtacacttggcggagatgcagttggtatgtcaacagtacctgaagtaattgtagcgcgtcatgctggtatgaaagtgttaggtatttcttgtatttcaaatatggcagctggtattttagatcaaccacttcaccacgatgaagtaattgaaacgacagaacgtgttaaagctaacttcttagcattagtaaaagcaatcgtaaaacaaatgaaggggtgacttcacaatgagaatggtggacctaattgcaaaaaaacgtgacggacatgcattaacgacagaagaaattaactttattgttgaaggatatacgaatggtgatattcctgattatcaagtaagttcacttgcaatggcaattttcttccaagatatgaacgatcaagagcgtgccgatttaacgatggcaatggtaaatagcggtgatacaatcgacttatcagctattgaaggtgtaaaagtagataagcattcaacaggtggtgttggtgatacaacgacacttgtattaggtccattagtagccgctttagatgtaccagtagcgaaaatgtctggacgcggtttaggacatactggtggtacaattgataaattagaagcagttccaggattccatgtggaaattgaaaacgatgaattcatgcgtcttgtaaatgaaaacaaaatcgctgttatcggtcaaagtggtaacttaacacctgctgataaaaagctatatgcacttcgtgatgtgacagcaacagtaaactcaattccgcttattgcaagttcgattatgagtaaaaaaattgctgctggtgcagatgcaattgttcttgatgtaaaaactggagcaggtgcatttatgaaaacggatgaagatgcaaaacgtttagcagaagcaatggtacgtatcggtaataacgttggtcgtaacacgatggcagttatttctgatatgagtcaaccactcggtgaagctatcggtaacgcattagaagttcaagaagcaattgatacattacaaggtaaagggccgaaagatttagaagagctatgtttaacacttggaagtcaaatggtgtaccttgctggacaagcttcatctttagaagatgcacgtgaaaagctaattgaagtaatgaacaacggaaaagcgctagaatcatttaaaacgttcttatcagcgcaaggcggcgacgcatctgttgttgatgacccttctaaattgccacaagcacaatttaaaattgaagtggaagcgaaagaagacggatatgtatcagaaatcgttgcagacgaaatcggaacagcagcaatgcttttaggagcaggacgtgcaacgaaagagtctgaaattgatttagcagttggtctaatgctgcgcaaaaaagtaggcgatagagtgcagcaaggtgaatctctcgttacaatttacgcaaaccgcgaaaatgttgaagatgtaaaagcgaaaatttatgagaacatgaagatctctaaagaacacgtagatgcaccaactttagtacacggtatcgtaacgaagtaataaaaaaaagctgaggagatttctccttggctttttttactattttttgtttataataataatgggtgaaattatgattagaatttgtgcagtaacaaaaacagatgaagtattatatgatgtttctctagaagaaacaaagaaagaccatattgtatggtattggctagatttatataagccaacgaaagaagagtatacatatattctgcaagaccattttaagttccatccccttgcaattgaagactgtatagaatatgtacagaggccaaaagttgatttttatgatggatataactttttagtacttcacgcatttggggaagatggactagaaccgcacgaaatcgatttatttattagtgatcgttatattgtttctttccacttttctcataacaatgcaatcgaaagagtatggaaaacacttggagaaaagaagcgtattaaaaatagtcctttacacgtagctcatacaattatcgaccaaattgtagatgactattttgcgcctgtatattacattgaggatcatttaaatgcaattgatgataatttaacgggggagacagcaggaagtgtattagaagaggtatttgatatacgtacagatttatcaaagctaaggcgtacaatcattccgatgcgtgatttattatatcgtattttaaattcgactcgtttttacggtataagcgatcatgaaatttactttaaagatatacatgatcatttgcttaaactaacagaaatgattgaggcaagccgagagttaacagcagatattcgggatagttatttttcattaaactcacatcatatgaataacattatgaaaacattaactgtattctcgactattttcatgccattaacatttattgcgggagtatatggaatgaactttacgcatatgccagagcttggtggacaatatagttattttatttgtctacttattatggcactaattggcggcggaatgatggcctggttttataaaaaaggatggtttaagtaaaaaaacaccgaggatttcctcggtgttttttttaaccaatagcatgtaatacaaacatagctaaaaataagcatgtaatgatatacatagatggtgcgacttctttacgctttccaagagcaacttttaagatagggtaagcaataaatccgaacgcaatgccatcagcgatactatatgtgagcgggatcataacgataattaagaatgctggaaatccttctgaaaagtcattcagaggaatttgttgaatgcttgtaatcatcagaccgccaataataattaagattggtgcaatggcactatcaggaattaatttgacaaatggaagagcaaacagtgatgcaaagaatagcaacccagtaacgatagacgtcagacctgtcttaccacctgcagtaatacctgcggcactttctactgttgaaacggtaggacttgtgccaaatagaccacatgttattgctgaaattgcattggcttggtaagcacgtgggaatttacgatcatcttctaataaaccgtgcagaagtcccatgttctcaaagataagcaccatgcttaaagagaatgttgcaatccaaaatggtaaggaagaaagtttcccaaatgacatagctccaaacacatcaccgtaattagcgaatgagaatgaactacttcccacttgactcgtatccacaagaccaaatagccaggcgataccagttcctattgcaatcgtccataaaaagtttccacgtacgttacgaataaataatacaagtgcaatgataagagtaagtaatgtcgcaagaacgacaggattacttaatttccccattgccacagcagtatttgggttcgaaacgactaaaccacctttttgcaatccgataaacgctaaaaataatccgatgccgacagtaatcgcttcctttaatgactttggaattgatactgatagcacgcgagcgattggtgtaaaagcggcaattgcaaaaataataccagagataaagacagcagccaatgcttcttgccaagttagtccaagcgtatgcacagctgtgtacgtgaagaatgcatttacacccatacccgggacaagaatagcaggtgcatttgcccaaaatgccatgagtagacatccgacaaatgaactaaaaacagttgctaaaattccagcttcaagaggaatgccagcatctgataagattgacgcatttacaatcataatatatacgattgtgaaaaatgacgtaactccagctaatacttcttgttttggtgatgtttcgtgtaaacctaatttaaatgttctttcaagtattcctttcatgttaaaccttctttttcatatccctctcccacccgtgatatctcttatgtaagagctcaccgttctttattatatcagaacatcatgtttttacaacaagtaaaatgataacgtttacttgtaaagagaattcgttataaatacgtaaaaatagcccgtatggatgaaatgatttctaattcacccgattgaatgggaggggctgcttgcgcatgtaaagtagcataagacgtaacctcccgtggtaattgggcagattcttcaacgaatgagaggggaacaggattaatatttaaattatatgtactcgcaatagcacgagctttttctactgcttggtgcagagcttgaatgagagcttgctcataatatttatttggatgagatactcggaaacgtaaaccttttgctacatttgcgccatttgaaacggctatatcatatacttccccagctttttgtacatttaaaacggtaatttcatacaaatgctccacgcggtatccttgtagcaatgctttatcatttacatattcgtattgaggagtaattgtataagaaatcgtttctatatctttatcggcaataccaagctgtttaagtgcatccagcaattgtttggattgcactgcattttcttcttgagcctgttttacatttttatcatctgttcgaatgccaagcgttaatataacaacattcggttttgctttgacaacgccttcgccttgtacagtaatagtagcttctttaccagtattagctgtgcgtacgttgtgtaaataaggattcattccaccctgcattttccatcaccatcctttttatatgtatatgtgtgaacaaaaaagaaatttatatgaaaaaagttacataaatgagaatgttgaggaaagaaagcatgtacaacataggtatttatagattataatatgtgtaaatatgataaaaaagggacgaggctattgaacgaaaaaagagaaacgctgattttagatttatctgcatcatttcgaaaaatgatacgtttattacaaaatgatattaatacacgttttgcagaacatatgccatataatgaattttctgtattacgtgcgttatttttaaagagtccacagatggcttcgcaaattgcgagtgaagtaaacgtaacctccagtcatattacagctgttacagatcgtctcgtacgaaaaggattagtagaaagaaaacgttctaattcagatcgtcgaatcgtgtatttagaaattacagagcacggaagagaagtaactgaaaaacttgaagctgtgcgtaaagaatattataaagagagatttaaaggttggagcgaccaagaaatagaaatggtcttagaactatttggccgcgtattataataaatgaggataggaagcgaaagcattcctatcctttttcttttgaataaaaatattttgaaactccgatactttaattaaaagatcggaggaaagattatgaaatatattgctgcacttaccattttatttggtggttttttctattttcaaacatttacgtacgcagatacgcctatccaagtggtacgaaaagaagtgaagtacattgaaaccgataatacagtcttatattcgaaattatgggttcgttctatgcaaaacgcagtattattccaccatagcgataatattcgtaatcaggacacattacgtaatgtaacaagttcatcgcttgttaaagcgaaacaactattttttcagaaagcagcactctatataccgagactatcgcaatacgtatcaaaaataggaaaagaaaatattcaagtgtactacattgcgattcactataatgtgaaaaaagaaaatgcatatcaattagatggcatgaactattttctacaagtatttgtgaaagagcgtggggaatggaaaattgctgaaagtgtagttgcaccgacagagcaaattgtgcaaaatggtgatggatttgggatgaaagaagagatggtgtatggggataggagagagaatgtgaaataacctctttatttagatcgggatatataataaaaaagcattgctcttgtgcaatgccttttttatttggttcatataagagttaaataattcataacatatttcttttgtcattatataccttttttgtcagcttctatttaatgtcattgttccgtgtttatagtttcacatctatgatgcttttggaaacatgtatccaccaccttaatgcatatttatttccctacaaaagcaaacttcaattttaatagacgtgtaaaaatgaagtaacttatggtagcgaataggaaaaatccaacataataagacagaagtgcatctcgtccgcctaatattctaccaccaagtagtccgaagcatagaacagtgcaaattatgaaccatttttgcaagttaggaaacaatagtatttttccactttgttcgtttggtgtacgtgtgtatagaaaggttgctattgataaaaaggtaatgatgtaagcaaatggtgttaatagtgtccaaggagaaggtacagaaatacgctccgtaggattgtcctgtggtacactagaaagtttattgccatagtcatcaaatgtttctatcgggtggtaatcataagtaatagaaaaatattctaatggtgaaatgatacctatatgttgtaagtactcatgagtatggtgctctatttctcccattgcatctacagaccattgtgtgtgtgaataaatgaatccggaaattaacaatccaaaaccgtatggtaaaaataatagaatgatagttaaaatactttgagaaaatatatgtccagtaagagtcccgataaataaggcgaatgtataaatagcgataagtacaaccgtagcatatagaaagtaactatagaacggagcaaaggtttgatactcattgtgaaacgacatgttctttattccgtacatgctaatccagcaaacaatttgtactgtaataatattcaaaacaccaagccaccattttgttaaaaaaatatcctttcgtttaaaaggcatcgagaatagaaaatcagttgattgattattacgttcccatccaattaaaagacaagcgagtgcaattagagtagctccttgaaagaagacggcaccatcagatgtctgaaaatagtaggagtagtaatatgcatagtcaccaaacttcatttttgatagttttagttgcatttgcgcttcttgataatatttataaggtagttgatataaactagttaaccaaaataatagaattatatattttccttgcttccattgcctcatccataaagctttatgaaacatgtgaatcctcctcaaatgtagtgataaaaatatcttcaagtgacattgttaattcttcaataagtataggttgctctttgtaaaacttctcgagtgttgtagccacatttccctcaattaagattgtatatacttttcctgtttggtttaatattttaatattgcttaagttttctagcttttgaggtaatgaacgttcgtaagctacttgtatttttgcaaatcgtgattttgcatcgtctagtgatgtaatagacgagatagtatggccttttaatataataattgtatctgcaatttgttctacttcatctaaatggtgagtggagatgaaaatggtaatctctttttctgcaacttctccaacgagaaactgtaaaattttccttttcacgataggatcaagtccatttgtcggttcatctaaaatgatatattctgcctttgtagaaacagctaaaatgatggcgagcagtgctttcatgccttttgaatagctacgaattcgtttgtttggtaagttaaaacgttctaacagttcatagaaatgtgtttcatcaaatgcggtataaacttctttataaaactttacgatttcttttatcgtatagccgttcagtatattagtagaatcaggaacatatacaattttttgctttatttcaggaaactgatgaatgtttgtatcttcatatgtaacagttccctcgtctgggtctaaaataccgaccatcgttcgcaataaagttgttttccccgcaccgtttcttccgagtaatccgatgatactccctctttgcaatgtgaaagaaacattgtctaaaattgtttgactatcaattgttttcttcaagtttgtcactttcaacatccgtattccctccaatctctttatagtatgaatctatccaatcatgaattttatctttcgtaataccaagataagaggcttctaatagtaattgatgaaattgcttttcaaccatagcgattttcctttcgtctaatgttggggtaatcgattgggatacaaatgttccttttcctcgtaacgtttcaataattccttgtcgctctaactcttgatacgctttactcactgtatttggatttataacgagtaaagaagcgagttcgcgtacagaaggaagtttatcacttggagccaacatgtttttcaatacgagttcttttatattttgaacaatttgttcccatatcggagtgttgcttcttgggtcaagttgaatatgcaagagcaatgtctccttcctcatatgtattaagtgtactactgtgagtaatacacttaatacaatataggggacgaatgtatttgtcaactgaaaatgttagaaaaatttggtattaaaaaaaggtaaattggaaaaaataggtctgatatagaatggagggttagtcatgaagcgagtttttggaatacttgtttgtttcatgttattgctttctggaacttcagtgagtttcgcacaatctgagaaaacgaagcaggagaaaacagaagaaacaacaccgaagttagcggaacaagcgtcgtcagcaatcgtaattgagcaagatacaggtaaagttttatttgataaaaacccaaatgaaaaattaccacctgctagtatgacaaagattatgacaatgcttttaattatggaacaagttgaaaaaggaaaactaaaactgaccgataaagttagagcgagcgaacatgcagcttcaatgggtggatcgcaaatctttttagaacctggggaagagatgactgtaaatgagatgttaaagggtattgcaattgcatctggaaatgacgcatctgttgcagtagccgagcatatcgcaggttcagaagaaggatttgtaaatatgatgaacaaaaaggcgaaagatctagggctgaaaaatacacattttcaaaacccaacaggtcttccggccaaagaccattattcgacagcaaatgatatggctataatggcgagagaattgatgaagtatccacttattcgtaaatacacaggtaagtacgaagattatttacgtgaagatacggataaaaagttttggctcgttaatacgaataagctagtacgtttttatcctggcgtagatggagtaaaaacaggttttacgacagaagcgaaatattgtttaacagcatcggctgaaaaaaatggcatgcgtatcatttcagttgtcatgggagcaccaacatcaaaagaacggaacaaccaagtgacgaagcttcttgactacgcatttggtcaatatatgacaaagaaattgtatacgcgcggcgaaaaaattaagacagttcaagtagggaaagggaaaaaagaaaaagtagatttagttgcatcagataatgtttctcttcttatgaagaagggcgagaatatggacaaggtaaaacaagaagtaattgctgaaaagaaagtaaaagcaccgattaaaaaaggtgacgcgcttggtacacttgttattaaaaaagataaagatgttttattaaaacaaacaattgtagcaaaagaagatgttgctgcagcgagctggtgggagttatttaaaagaagttttgggatgttttcaacatcaaaatagcggcaaatattttgccgcttttctattcgtatgtaagtgaataatgctgaaaggtttcactttatgacgaaatagttcttcttttgtcagcaggaaggattcttattttgtatcacgaaaatctttatgtatgtgaataagtaaagtttgagcataaggaggaaatcgtgtgagtctttccatgcaattagaagtaaaacgtgacgtcctatgtgtgagactagagggtgaattagatcatcatacggctgaagagttgcgaacgaaagtaacagatatgattgagacacatggtgttcatcatattgttttgagcctagagaacttatcttttatggatagttctggtctaggtgttatattaggccgatataaacacgtaaagggattaggtggagaaatggttgtttgtgcaatttcaccgcctgttaagcgtttatttgaaatgtcgggcttattcaaaatcgttcgcttagaagaaagtgaagcgcacgcgctcgcgacgttgggggtggcatagatgagaaatgaaatgaaccttcaattttcagcattaagtcaaaatgaatcgttcgctcgcgttacagtagcggctttcattgcacaactagatccaacgatggaagaattaacggagattaaaacagttgtgtcagaagcggttacaaatgcaattattcatggatacgaaggaaatgcagaaggtattgtttatatttctgtaattttggaagaagcaatggtgaaactcacgattcgagatgaagggattggaatctttaacttagatgaagcgagacaacccctttttacaactaaacctgaattagagcgttccggaatgggatttactatcatggaaaattttatggatgaagtagaagttatttcaaacgaatctttcgggacaacaatccatttgacaaaatacttatcaaatagtaacgctctatgcaattaaggagaatagcctatggacatagaggtcaaaaatgagaagaagaaacctcagttaaaggaccacgagctaaaagcgttaattcaaaaaagtcaagatggagatcaacaagcgagagatacaatcgttcaaagtaatatgcgcctcgtttggtcggttgtacagcggtttcttaatcgaggatacgaaccagacgacctatttcaaattggatgtattgggctcttgaaatcggtagataaatttgatttatctttcgacgtgaaattttcaacatatgcagttccaatgattattggtgaaatacaacgtttcttacgtgatgatggatcagtgaaagttagtaggtctttaaaagaaacaggaaacaaaattcgaaagatgagagatgagctttcgaaagaattcggaagggctccaacgattaatgaagtggcagaggcactagaactaacgccagaggaagttgttctagcacaagaagcgagccgggccccttcgtctatacatgaaactgtatatgaaaacgatggagatccaatcactattttagatcaaattgcagatcaatctgaaacgaaatggttcgataaaattgctttaaaagaagcgattagagaactagatgaacgagagcgcttaattgtatacttgcgttactataaagatcaaacacagtcagaagtagcagagcgcataggcatttcgcaagtacaagtttcaagacttgaaaagaaaatattaaaacagatgaaagatcgaatagacgaataattgtctattcgatttttttatgccgttaataggagagagatgttaatttttgcaaaaattaacagaatttattgataatttagtcaatttaaaatataatccaagtatgaacttgtcataaagggggaaggaaacatggaaacgaggcaacaatggggaacgagagctggatttatttttgcagcggtcggatctgccgttggattaggaaacatatggcgttttccttatacagcgtatgaaaatggaggaggagcattctttttaccgtacttatttgcattattaacgactggtatttcattgttagcgtttgagtttgcccttggtcatcgtcatcgtggttcagcaccacttacatttttccgtattagcccgcgtgccgaatttattggatgatggcaaatgtgcgtaacatttatcgtttcaacatattatgcagtgattattgcttggtctatatcgtatacatactttgcaattactggagcatggggaaaagacacgcaatcatttttatttaaagagtacttacatgttgcagataagccagggcaatttggaggacttgtaccggaagtattaattccattagttctcgtttggattattgtgcttggcgttgcatttaaaggagttaaaaaaggaatcgaagttgttaaccgtatatttattcctttattagttgttatgttccttattatcgtcgttcgtgcagtgacgatggaaggtgctatgcaaggactagatgcattctttaaaccagattggagtcgtatttttgatgggaaagtatggcttgctgcttatggtcaaatattctttagtttatctttagcatttggaattatgattacgtattctagttatttaccgaaaaactcggatacaacaaataatgcctttattactggatttgccaactcaggatttgaattattagcaggtattggggtctttgcagctcttggatttatggcgaataatatgggagtaccggttgataaagtagcaagtgctggcgttgggcttgcgttcgtagtatttccgcaaattattaatgaattgccgatgtcaccgttgtttggtgtattatttttcttatcgttaacggttgctggaatcacatcacttatttcactcgcggaagtatgttttgctgctgtgtctgaaaaattcagtttaagtcgggaaaaaaccattggaattatgggaacccttctcgtgttagtttctcttgtatttgcaacacgtggtgggcttatgttcttagatgttgtcgactatttcgctaataatttcggattaattacaattgcacttgcggaagtagtgacgatagggctcattttacgtcgtttaccagtttatcaaaatcatgcaaactttgtatctgatattaaattaggaacgttttggagagtaagtttactcgttattactccgcttatgttagggtatatgctaattgatggtacaatccaaaacattaaaaagaattatggagattatccgactgagtttgttgtaacgtatggttggtcgatagcagcagccttccttatcgttgcgctaattattagtctaaagaaatggaatgcacaaatacattcggattctgccaagcttgaaaaagagtggaaagatcgaggtgtttcataatgagtggatcagcaattatgatgatggttattggaatagtagtcatttggggagggcttgcattaagtattgcaaacttatttaagaaaaaggcataagtaaaaaacatctgtaccgaaatggtgcagatgtttttttatgaaaaaattgtattagaaaaaaattcaataaccatactacaactacgaggaagagtgaaggggtgaatgaaagttggaacaaacgatttatattaaaatgcgcaatcgtttaaaagtttctcctacttatgaagtaaagctgggcgatgttgctcaacttgccggagattcttccgtagttgagttgttacaaaatgagatagtttacaaaataacagcgcatgataagacgcatgttgtaattgatgttatgaaagtaattgagattattcaacagaaagcatctcatctacaaattaatttactcggttctggacaaactcttgttgaaattatatacgaaaaaaagaaggcacacccaatttttttcgggcttgtatggctattacttttcattggagcggcccttgcgatcatttatttccatgaagatgtaagtatgcaacaagtacatcaacggttatattacatgattactggagaatttaatgcgcaaccacttttatttcaaattccttattctttaggtcttggtttagggatggttttattctttaatcatgtatttcaaaagcgaattaatgaagagccaagtccgctagaagttgagatgtttcaataccaacagtcacttgatcagtatgtaatcgttaatgaaaacaaggataatatgaaacaacttaccgatgattgagtatggatttgttattttaattggtttagctggagggattgcggtaggtagcggatatgtcgcatttttagctgtacttggtataatcccccgtttagcccaattaacgagaagtggaaagcatattcaatattttgagtgggcagttattgcaggtactttaacaggggcttggtgcagtttgaaaaacattacatttcaaacgtcgcaatattggctcgttatattagggatattttgtggcacgttcattggaatgcttgctgcggcattaacagaggtgttaaatgttctacctattttagcgaaacgagtaggggtagagggcaagattattgttttactcgttgctattgtacttgggaaagtaataggatcgttgtttcactggatttatttcgtaaagtaggaggcagtatataaatgacaagtcagaaattgaaggatgattacataaataaagtgaaggagtatcatccaaagccaaactatttactaaattgtatcaaagcatttcttgtaggtggactcatttgcacagttggagaagcattgatgaaattttatatacattattttcactttagtgaacaagaggcaggaaacccaactgttgcaactcttgttttattatccgcgattttaacagggtgtggtgtatatgataaaattggtcaatttgctggagcaggatcagcggtaccggtaacaggatttgcaaattctatggcgagcgctgccttagaacataagagcgaaggggttgttctagggattgctacaaatatgtttaaactggcaggaagtgtgattgtatttggggttgttggtgcatatatcattgggttaataaggtatacctttaaaatttttatgtcttaaaggaggggctagtatgaggttgaccggaaaacaaacgtgggtatttcaaaatgatatatatgtaaatgcaacgggcactgctgtcggtccgaaagaagctgagggccctcttgggaaaaaatttgatatttcatatgatgacttgcattgtggagaagaaaattgggagctcgccgaacgaagattaatgtcagactcaattcaacaagcggtgcaaaaagggaatataaaaacatcgcaaattgatttctttttagcgggagatttattaaatcaaacagtgacagcaaattatgttgcgcgtaagtggggcattccttttttaggaatgtttagcgcttgtgcgacgtctatggagactttagcagttggctcagcttttatagacggtggatttgcaaatcgtgtcttagctacagtaagcagtcataatgcaacggctgaaagacaatttcgctatccaacagagtatggtggacaaaaaccagggacagcaaattcaactgtgactggtgcaggatctatattaattagcgatgaaaaaagtgcaattaaaattacgtcagctacaatcggaaaagtgcaagatttaggaatcacaaatcctttggatatgggggcagcgatggctccagcagcagctcatacaattcaacaacattttgaagatttaagaagaagtgccgatgattatgatttgattgttacgggtgatttatcagctgttgggacgccgattgcgaaacaacttttacttgaggaaggttatgatcttgggcatatatacaatgattgtggattgatgatttatgaagcaagtcaagaagaagtgtttgcaggtggtagtggttgcgcttgttcagcagttgttacgtatggtcatttattacacgagatgcaaaaagggaatttacaacgaatttttgtcgttgcgactggtgcattattaagcccaatgatgatgcaacagaaggaaacgattccaacaattgcacatggtgtcgtatttgagagagttaaaggagagtgaattgtggattttatatatgcatttcttgtaggtggagctatttgtttaattgggcaactattgttagatttcgtaaagttaacaccagctcatttaatggcaacttttgtagtcatcggagcaattttagatggatttggattatacgataaactaataaagtttgcaggtgctggagcgacagtccctattacaagttttggacattcactattgcacggagcaatgcatgcagcagaaaaacatggatatttaggaattggtattggcatgtttagtttaacgtctgcgggtatttccgcagcgatattgttttcattttttatagcacttatatgtaaaccgaaaggataaatcaaatgagacgaagggttgttttggtcacagatggagatgaatatgcaaagcggacaattgagcttttaacgaaggaatttgggggaaggtgtatttcagcatcacaaagtaatccaaccaaattgacagggaaaaaagttgttgagcttattatgcaaacgccatatgaccctgtatttgtcatgtttgatgacagtggatttattggagaaggatctggtgaaaaggctttaaaatatgtggctacccataaacaaattgatgtgctcggtattttagcagtagcgtctaatacgcatcattgggaatgggcacgtgtagatgtaagtgtagatcggaacgggaatttaaccgaatacggtgttgataaatttggacttccagatggtgaaattggcaggattagcggagatacaatatattgtttagacgatttaaatgttcctgtcattgttggagttggtgatattggtaaaatgtgcggaaatgatgaatgggagagagggtcacctattacaaagaaagcaattcaattaattttagaaaggagtggattttatgacgaagcctaaaaaagtggatatccctatatcaactttcataagtgacaatgaaaattatttaaaacagacagttggactaggcgttacatacgatgttggcattcgtaaatttcaaattttgaataaagaaattggtgtgttatttgtaaacggactttgtgatacaaattatattatccatattttagaagaagccgtggatacaaatgagataagggatgtagaagaagatacagttaagcttttagagaatcgcttaatccatcaacaagtaagcaaagtgaaaacgatggatgaggtaatgctccaagtattatcaggactcattgtgatatttgtagaaggtgaaacggaagcgttcgcgatcgatgttcgtagttatccagggcgaacaccgacagaaccagataccgaaaaggtagtacgtggtgcgagggatggatttgttgaaaatatcgttgtaaatacagcattaattcgtagaagaattcgagatccacgccttcgaaatgaaatggttcgagtaggagatagatcgcaaacggatatttgtattacatacgtacaagatgttgcaaatgcggatttagtaaagattataaaacaagaattaaataacattgatgtagatggaattacgatggcggataaaacagtggaagaatttgttgtaaagcaaagctataacccattcccgcttattcgatatacagaaagaccagatgtagcagcaaatcacctactagaagggcatgtgttagtactcgtcgacacatcaccaagtgctatgattacaccgacaacatattttcatcatttacagcatgcggaagagtttagacaaaatccagctgtcggtacatttttacgctgggtgcgctttttaggtgttatattttcgttatttttattaccattttggttagtgtttgtatttgatccaactcttttgccagcaaatctggcttttattggaccgactaagatgacgcatttaccaattttattacaagtgttaatggcagaggtcggacttgagtttttaaggatggcagccattcatactccaacgccgttatcgtctgcagcagggttgatttccgctatattaattggtcaaattgcaattgatgtaggtttgtttgtgccagaagtaattttgtatgtagcagtttcgatggttggtgcatatgcaacaccgagttatgaattaggattagggaataaggttgggaaattgtttgttattattttaacaggtctcttccatgagatgggatttgtaattggtatgacgatattaattttatttttaacgtctataaaaagtttacaaacaccttatttatggccgtttttaccatttgattggggcgcgttaacaaaaattttactccgtccaacaatgtctagtttaaaagtacgaccaagtattgtaagacctcaaaatgtaaaaagacaaaaataaacgggattatacacccgtttattttttttagcaaaaatttattattttttaacaaaaatcaaacattttttgtgtacacttagagtagatattgtgtatggaaggggaagaggacatgattaaattatttgtaagtgatttagatgacacgctcgtttacgatgtgaatcatatgcaaaaagaagatgaacgtgcgctgtgttggttagctgagaaagggacaaatatttgttttgcctctggccgctttacacacagaattgatgaagttgtaaaaaggttttcattcccatattacacaactggcttaaatggagcgacaatgttacttccggatgggaatttatttcatgaatcgagttttgaaaatacggttgctcaggaaatatatcggtatatacataaaaaaggactagcggatattgtttgtgcaaatgagcagcgatatacaaaaaggaagaatgaacatcaccataattttgaagcatatatgggcgtgcatatcgctgaaattgaagcgttagaagaagagtttggtaagactgtacaccctgcaaaattgtttgtttttggagaagaagagaaaattgtgacgttagatcaagagctacgagatacgtttcaaggcgaagcggaagtttttatatcaggtaaacgctatgttgatattatgccaagaggcgtgagtaaggggagtgctctaaagcgactaatggatcatttgcaaattgaagcaaatgaagttgcttgtattggagattctttcaatgatatttctatgtttgaagtaaccccacattcatttactcttcatcatgcccatccatatgtaaaggagaaagcaaatcacatagtgcgttcggttgaagaggctgttatgaaattaccgttacttgtataaaaaagaagcccgtcattggcgggcttcttttttacttgaataaagatttaacaaaatcaatgatacttgagaagaaatctttcactttatctagaaaactttgcccttcttcagatcctaaaaaggcagaaacatgttcttttgctttgtttaattgactaccaacttgattccaatcgatattaagattcttcattttatcaaataacgatactaagttatctaactgttcatctgttaatgtaatgccgagttggtcagcaatttttttaattaatgaacgtaaatcttctgttgtttttggctgttcttttgcaatttcttctttaatttttgcaacaagttgaactgctttttcttcaccaattttatcaccaagctgggctgtttgtaccatttcttcattcgctacttttttaacttcttcaggaatttgtttattggacgcagtttcgtatgctttcattaatccagttaaagctgcagttcctgaaactttaaaaggtgcagtaatttgaatttctgcatcttttacacctgctgtaatcaaagcgttagtgtacattgcatctgttacccagttaatgttctttgatcgtacaataagaccagatcctggttttgtgtatgtaatcatagaagaagaaattgctctcgtaccaatttgtgcttttggaacaatgccttctagaaatttatgttcttccgcattagatacagtgataattgtagcatcttttggtgttttcatttcttttaacagatcttgtttttgttgttcggataagttctctcctaatgtaacaattgattctccctcgatgatgtctgcaaatgaagctgttggcatcataaataccgttacagctaatagcagagctaataatttcgttttcacgaaaaatcgctccctttctctttctaaaattttcgggcaacaaagttattatagtatatatttcttatttgtcacctagctttttccacatttcaaaaaagaagtatctagattgtcggattctttttgtttctagtcatgaatgtggtaatatagtgctgagataattgaaaggagacatatacgcatgaaaactttaggatacatattaatggaaaacggtgaaaaaatcgacttggaatttttcccagaagaagcaccgaaaacagtagaaaactttaaaaaattagcagagcaaggattttatgatggtgtgacattccaccgtgttattcctggcttcgtaagccaaggtggagacccaacaggtacaggtgcaggtggcccaggttactctattccatgtgaaactgatggaaaccctcatagacaccttgtaggatcactttctatggctcacgctggccgtaacacaggcggtagccaattctttatcgttcatgagccacagccgcatttagatggtgttcatactgtatttggtaaagcaacaagcggtattgaaacagtattaaaaatgcgtcaaggcgatgtaatgaaagaagttaaagtttgggaagaataaggtaaggaaaaagagagcttttgctctcttttttatttttaatgagattgagtacttcttctacagctcatcatacaagtagtattgttgctaaaatatattgcttgtgagaacaaacctttaaccaattacatagaatacattacattatatgtttcaataaatattttttgttatattaattttgctagaattgtgctgctttagggtaactatgaatgaagtgctgttgaatgatatgtttctttccattccatataaaattttctttttttaactctatttattaaaggaatagtgctgaaacatagatttgactttcttcttttcgctttgtatgattatcaagttgttttagactcttctcactctgttgaaaatattgtaaaatgaatgtgatatgaaaagagtgattgaggggattactagtttgtaacttttgtaagaagggataagggttatgttaattcgttttaaaaaaagttatgaaaaaattgcaatggggcttctttcgtttatgccaactgaaaaagatgtgaaaacattacaattgacaatgaaagaatatgaagcaaaagatgattggcaattgtatttgtggaaagaaaatgaagattttgttggaataatggggattgtaaaaaaagagaatcaagtattagaaattcagcatttgagtgtgaacccgtctcaccgtcatgtggggattggaacgaagatggttcaagagttaaagagtaaatttcttgagtttacaatttgcggaaatgagcaaacggcaagtttttgcgaaaaatgtaaagggctagaacaaaatatacattcgtgaaagcagagataagtagtttattatctctgctttcttttttgtaattgttcgtttcgttcagtaatgacctctgtgcgatcacgcaaagtgtgcttgtttataatatattcacctgggatagcattcaagtctttccaagagaggttttgtttttgacataactctatgcactgcttctctaacgatgaatctgataagggtaaaaataaaggtacaaaacgttcttttttatggatagattgcaatctttcattgagcaaggaaagaagttgtacttgattaattcctaaacgttgtaaaggcacaccgcttttttctaaaattgtgattgcgcttttcatcatttttgtggaaccattccaattagcacgtctttggtggtataaagaaactgcgatttgaatgagaccaactaagtaatgatcacgattacctcttggttttgttttccaatactcttctagtatttcgtggcattcaaaatagtcataatctccatggaaatgaattaaaaattgtatgtattcggtaggatacatgttttctcgctcctatctaacggttatacatataagtgtatcatagaaatatgaacaataaacgactaggaggtttccccctagccgttattgttcatattagcagaagcaagctgctcctacaataattagtaaaataaacagtacaacaagtaatgcgaacccaccgctaaaaccacaatcaacgtgacccatagttttttgacctcctacattgttcttactacactgttatcatatgaagtggtgggcatgatgacataggcatcggtctatttttaattaaatttcttaaaaaggttggatagaacatgagtatgctctatacttatgttgttatagaaaaaatgtggtgggatgctttgtgcaatataattttaaagtagaggcttttgaagggccgttagatctattgttacatttaatacatcgttatgaaattgatatatataatattcctgtagcagatattacagagcaatatttatcttatgtgcatacgatgaaagaacttcaattagatgttgcaagtgagtatttagtaatggctgcaacgttattacaaattaaaagtaagatgttgttgccgaaacatgaagaagatgtacttgataacggtgatgattttatagatgatcctcgtcaagaattgatggagaggttaattgaatataagaaatataagcaagttgctactgagttaaaagaaagagaacaagaaagagcacagctatatacacgtccaccaattgactttacatcgttgcaacaagaagaggagacaagcttacctcttgatgttacgttatatgatatgctagcagcatttcaaaaattaatgcgccgtaaaaaggcaaaaaaacctgtaacaacacgtattactcgtcaagaaataccaattgaacagcgaatgactgatattttaaagcagttaaaaataaagggtggtcgccaaagtttttacgatttgtttgttgatgatgaacgtgaaataatggttgtaacatttttagcagttctggaacttatgaaaaatcaacaaatcataattgagcaagaacataattttgatgaaattttcgtatcaagctctaataaatctgcatagagcaagtatgtgaaaatgggatagaaacattttatctcatgctatgttttaatgtatcgtttggaacaagagaaaaaatattgaaccgaacgcattaattgtgattcggttttttgatgtgtatttttatgggaaaatagaaggaaggagctcgtgaaatggataggaaagaacaaaagtcaattattgaaggccttttatttgtttctggtgatgaagggatttatccagaacaaatagcgaaagttcttgaaattgaaatgaatgaagtaattaatattttagaagaaatgcaacaagaatgtgaaggtgcaaaccgtggtttgcaaattgtacagtatgcaaaagtatatcgttttgctacaaagaaagaacatgcttcatattatcaaaaattaatagatacaccaacagctgcttcactctcacaagctgccctcgaaactttagcgattgttgcatatcgccaaccaatcacaaggactgaaatggaagagattagaggagttaaaaccgataaggcgttacaaacgttggtttcacatttacttataaaagaaatgggaagagcagaaggaccagggcgtcctattttatacggaacaacaaaagaatttttggacacatttggattgaaaacattagatgatttaccaccgctttctgaagagaatgaacaaatgaatgaagcggatttattcttcggttccttacaagagatatcgaaataaaagcttagcattttgctaagctttttttgtatatcaattatttacagtgccatactaaatgaaaaaaggagacgagttatgagaagtatgcggattattttattattagtttctgttttattatgtttttctttaaatagcgcatcagctaaaaggtatatgatgtccattcatactacgtctcctttacatatgcatcggcaacatcttagtaaaatgaaagtgagctttttaaaagtggggcaaggtgacgcaacacttattataatgccaaatggacaaacaatgttaattgatggaggaccttatgaagcaggagaggttattattcagaaattaattgagaaagggattaatcatctagatgtaattgtcagtacgcatcccgatatggatcatataggagggttaattccaattgtagagcaaataccggtatcgcttatattagatagcggaaaaacatatagttctcttacttatcatacgtatcggaataatattaaaaaaagagggatacctttcgtttcagtaaaggaaggacaatatataccgctggatccacatgtttctatacaagtattaaacaacgggaaatcaaaagatgaaaataatgaatcctcaattgttttaaaggtgcgatatggaaaagcggattttttattaatgggtgacgcggatgtacgaacagaacatgaaatattaaaacaatttgatgtccatgcagatgtgttaaaagtggggcatcacggctcatatacttcaacaagtgaaacgtttataaaaaaagtggaaccgcagtttgctattttgtcgtacgggagtagtaatccgtatggacatcctcaccaaagtgtagtgaaacgcttaaaaaggcacggtataatggtatatagaacgaataaacgtacagtagaaatggaaacagatggtgaacatattatgttagagtctagcgggttaatgccattattgaagtgatttctatattagggggcgatactgtccctttttggaaaaatgaataatatatattataattataagagacgtaagaaatttccttttctgttgaataaaaaggaaattttattagaatgtatagacaactactcgtgtgtatattaagatggaactaggcgaataaggtaataataacaagtaggtaattcatgggaaaggatcgatgaaaatgaaaacgcaaattgtcatcaatgccaaaatttacacaggtcaagaaatagtggaaaacggatttattcgttacgcagaaaccattaaagaaattggtttgatggctcaatatgtaccacaagaaaatgaaactgtttttgatgctacagggaagattgtaattccaggtatgatcgatgttcatattcatggtggatacgatattgatgcgatggatgcaaatagcgatgggttagtaactctaggtaaagaaatgttaaaagaaggggttacaacttacttcccaacaacaatgacacaagctccagaggcaattgaagcagcgttaactgctgcaaaagaagcaaaagaaaaaggagcgcattttgaatatattcacttagaaggaccttatgtttcaaagaaacgtgcaggtgcacaaccacttgaacatatcgttcctgcaaatattgagcaatttaaacaatggcaagaagcaagtgggaatttaattaaattagtaacatatgcaccagaagaagagggagcattagagtttgaacaatatcttgctgaaactggtgtagttggcacaatggggcatacagatgcaattgatgcgcaactaaaaaatagaaagattacacatgcgacacatttatacaatcaaatgcgtggattacatcaccgtgaaccaggagttgttggtcatgtgttattaaatccagatgtaatggttgaagtaattacagatggcattcatattcaccctgatatggtgaaattagcatataagttaaaaggaccaaaaaaagtaagtgttattactgacgcaatgcgtgcaaaaggtcttgaagatggattatatgagcttggcggacagccagtacatgtaaaagatggtagtgctcgattagaagatggaacgttagctggtagtattttaaaaatggatcaagctttccgaaatgtaattgaatttacaggttgttcaatcgaagatgcagtactgatgacatcagttaaccaagcagaagagtttggattaaataataaaggtgcattagcggtaggaaaagatgcagactttgttgtgatgaatgaagatttacatgtatatgatacggttcgtttaggaattcatatgaaggaagggaagtaattaaatgaatattcttgttgtaaaaactccagaagaactagcagaagcaggttataaattaattgaagaagttgtaaaaacaaaagaaaatccaacattaggaatggctacaggaagctctccattaggtatttatgcagaaatgcgaaaaaataaacttgatacaagccgtgtaaccactgtaaacttagatgagtacgtaaatttaccacatgaagataaaaacagctatcactatttcatgcaagaacagttgtttgatcatcttccatttaaacaaacttatgtaccaaacgggatggcaagtgatttagagaaagagtgcaaacgttacgagggcattctagctgctaacccagttgacctacagattcttggaatcggtgaaaacggtcacatcggatttaatgagccaggaacaccgtttaattctccaacaaacattgttgaattaacagaatctacacgccaagcaaaccttcgcttcttcgagaaagaagaagatgtgccaactcatgcgattacaatgggaattggaagcattatgaaagcgaaacaaattctactagttgctatgggttctaaaaaggcagaagctgttaaagaattattgcaaggtgaatatagtgaagagtgtccggctacagttttacaacgtcatccgaatgtaaccgtaatcgctgatcaagaagctctatctttatgcagtgaggcgattgctgatgaacatcgacaagtattcaccatttccgatctattatcagattcaagagtgggtgaaacagctaattgaggacggcgaatggaagccgggagataaaatcccatctgagaatgaactttgtgataagttcgaagtgagtcgaatgacaatcagacaggcgattaataatttagtggaacaaggctatttatatcggaagcgtggaattggaacatttgtccaacttccgaaagtggaacaaaaattgcaaggaatgacgggattcacagaagacatgatttctcgtgggatgaacccaagtagtcaattacttagtttccgcctagttccagctactgctaaaatagcagaccggttgagaatacaggagggggaatcggtttatgaagtgaggcgtattcgcttagctgatgatgaaccgattgcttttgagacgacatatttgtcgccagctcttgtaaaagatattaacgaagagatattgcaacaatctttatatgaacatttagagaaaaaactgggctttaaacttgttagcgctactcagtcaattgaagcttccgttgcgacggaaaatgaagctgaacatctgcatattcctaaaaaggcgcctgtacttgtaatgcgtcaatggtcatattcagaaggtgaggtaccgctagagtacgtgaaatgtatttatcgtggagatcgttataaatttattacgaatatcgcacgtaacaaatagtatatttcagtttgtgaagtacagtggaattgaaaatggttaacatgtaaagaaataaaaatacgactcatccttataaggaatgagtcgtatttttattatgagcaattacgtggttaacagcatctttgacgtgatttactacatagtgagcgtgattttttactgcatcatctgcttgtgacatagcaaaactgtgaggagttaaagaaaacataggaatatcattgtaagaatcccctatacaagcaatttcctcaggttttatttgaaactcatttaataaaacagaaatggcagagcctttactaacattcggtggcattacatctaaacattgttctgctgagatgaaagtactaactttcccgtggaatttttcatcaatttttttctgaaggagttgtaagctctcctttgttccaccgacagaaattttatttgggaaaatcgtatcatcaatcttctgtagtaagtttggttcttcaacagaagtcatagttacttgttgttcaagttcttgaataaaaggtgttttctcttcaatgtaataattatgctcatcacttacataacggaaataaggatcttcattcgtcatagctaacaaatcgggaagtatgctggaatcaaaagttgcagataatagttgtttattttcatgtgtatatacaaaaacaccatttacactaatgcgatgaaaatttgtatttacagctttcattaagtctgcaatttcattatcaagtcttccggaagcgaagcaaagaataacattttgttcggcaaggctgcgtagtgccgcaacatcttgttcatcaataagacctccgtgttgcatcattgtaccatcgatatcacttacaaacattttaatcatgctgttatctcctttctatgtacagttgctcttacattatacgcatcatatataaacatgtctaaaaaatgaatttttattaaatggcagatgttttacattgacgacaaagaagaatattctgtaacataaaagtaggctatttaagtacgagggtggtgttatatgagtaattatctagaaattaaaaaagttttaaataataatgtcatcattgctagccatccggaacacgaggaagtagtagtgattggcaaaggaattggatttgggaaaaaagcgaaagatgtattggagcaagaacaaatcgaaaaaatgtttgtcttaaaaaatgaacgtgatcgtgaacaatacaaattattagtgccgcatattagtgaaaaattaattgaattgatgaacgatattatgctgtacattcaagaaaaagcgaaatctccactaaatgaacatattcatattgcgttaacggatcatatttcatttgcgattaaaaggttaaaacaaggacttacaattgataacccttttttagttgaaacaaaaatgctctatccagaggaatatgaaattgcggaaggtgttgtacaacttttaaattctcgtttgcaaattacattgccagaaggagaaattggttttattgcacttcacatttacagttcgcttacaaattctgatttatcttcagttaatcaaaactcccgtctcattgcacaacttgtatctttaattgagacaaacttacaaattacattagaccaagagagcattcattatttacgccttattcgtcatcttcaatatgctattgagagggtgaaaaaaggagaaaaagtagaagaatcgcaaagttttgctgatttattaaaggcggagtatccagtttgctataacttggcttggaagctagttaaggtcatgcaaaatgagttgcaactacctgtatatgaagctgaaagtatttatttaacaatgcacttgcaacgcttagtgaaggcagagcatgtgtaaaaagtcatatatttttgtctaaaatgaaaacgttaaaaaaaatgattgaatcgcttacaatagttatgtataataactattgcaaagttatacaaatttcgacaaacacattaaggtgagtaacgaaaacgtttgccttaattatagtgaacttatacgtaaacctatttttgacacgtgttactgattcgatcaggcatgagtggagaaaagtaaggaatgtaagctagagaaagggatatactaccctttgtatagctatcgttctatctttttttcctcatgtctttttggcgtttgtcggaaggtatcaatatagataagagaggaagggtttccatgtttaagaagatctttggtgttcttcaaaaagtcggaaaagcgttaatgcttccagtagcgattttaccggcggcaggtattttacttggatttggtaatgcatttcaaaatccacagttaacaaatattattcctgctttaaaagcagattggttcgtaatggttgcaaaaattatggaacaatctggtgatattattttcgctaaccttgcattattattcgcagttggggtagcaattggtttagctggtggagacggagtagctggtttagcagcattcgtcggctacttaattatgaacaaaacgatgagtgtgttcttagaagtagataagctagtgaaagtaacaagttctggagcagacccagtaaaaattggatttgcagatccagcgtatgcaaacgtattaggtattccaacgctacaaacaggggtatttggtggtattatcgtcggtatagtagcggcatattgctataataaatacttcaacattgaattaccatcatacttaggtttctttgcaggtaagcgtttcgtaccgatcgcaactgcaacattctctttaatagtaggtattatcatgtgcttcgtttggccatacattcaaggtggcttaaacacgttctcacatcaaatgattgatgcaaatagaacaattgcagcatttatattcggtttaattgaacgttcattaattccatttggattacatcacattttctattcaccgttctggttcgaattcggtcagtatacgaatgcagctggcgaattaatccgtggtgaccaaaaaatctttatggcacagttaaaagacggtgtagaattaacagcaggtacatttacaactggtaagtatccgttcatgatgttcggtcttccagcagcagctttagcaatgtaccatgaagcacgtccagaaaataaaaaattagcagcaggtattttaggttctgcagcattaacatctttcttaacaggtattacagagccacttgaattttcattcttattcgtagcgccagtattattcggaattcacgctgtatttgctggtctatcatttatgacaatgcaaattttaggtgttaaaattggtatgacattctctggtggtttaattgacttcctattattcggtgtactaccaggccgtacagcatggtggtgggtaattattgttggtcttgtactagcagttatttactacttcggattccgctttgcaattcgcaaatggaatctaaaaacacctggtcgtgaagtggcaaatgcaaatgacggcgcaggaaaagcagaagcaggcgaacttcctcgtgaagtattagtagcacttggtggtaaagaaaacattgcttctttagatgcttgtattactcgtttacgtgttcaagttaacgaacaaaagaatgtaaacaaagaccgcttaaaagaacttggagcagctggtgtacttgaagttggaaataacattcaagcaattttcgggccgaaatctgacacattaaaatcacaaattcatgatattatgtcaggtcgtacacctcatgttgaaaaagaagaacctgtaaaagtggaagaaactcctcaaaaagttgatgaaaatgaaacaattgtatcaccaatcgaaggaaaaatcttaccaattacagaagtacctgaccaagtattctcaggaaaaatgatgggagacggatttgcaattgagccaactgaaggaacagtagtttctccagttaacggtgagattgtcaatgtattccctacaaaacatgcgattggtattcaatctgaaggcggaaaagaaattttaatccacttcggtattgatactgtaaaattaaatggtgaaggttttgaagcgcttgtagcacaaggcgacaaggtgaaacaaggccaaccattattaaaagtagatcttgcatttgtaaaagaaaatgcaccatctatcattacaccaattgtctttacaaacttacaacaagggcaacaagtcgaattgaaaaaagatggaaatgttaagaagggcgaaaccgctattattgacattcagtaggaatttgacgcaaaatgtttataattataataggcgatgtggttgaccgaacatcgcctattatatacaatagatgatgtagtactcacatctatacaactaaaaaatactgtaatttaaaggagataaattatcatggaaaaaatctttaaagtaactagcgactcaggaattcatgctcgtccagcaactctacttgtaaacactgcaagcaaattcggttctgacattaacttagagtataacggaaagaacgttaacttaaaatcaatcatgggcgttatgtctttaggcattcaacaaaacgcagaaattaaaatcactgcaaatggtgatgatgcagctcaagcactagcagctatcgaagaaactatgaaaaacgaaggattaggagaataatgactcttaacattcaagggatcgctgcatcaagtgggattgctattgcaaaggctttcagacttgaaaatcctgaatttaacatcgaaaagaaatcaattacaaacgaagctgcagaaattgcacgcttagacgctgcgcttgaaaaagcaaaaactgaattagaagctattaaggaccacgcatttgctgagctaggtgctgacaaagctgcgatctttgaagcacatttattagtattaaatgatccagaactagtaaacccagtaaaagataaagtaaatagcgaaaaagtaaatgctgaatttgcaatggatgaagttgcatcaatgtttatttctatgtttgaaaacatggataacgaatatatgaaagaacgtgctgcggacattcgtgacgtaacaaaacgcgttcttgcacatttactaggaattaacttctcaaatcctggtacaatttctgaagaggtaatcatcattgctgaagatttaacaccatctgatacagctcagttaaaccgtaagtatgcaaaaggtttcactactgatatcggtggacgtacatctcactctgcaattatggctcgttctatggaaattccagctgttgttggtacgaaagttgttatggagaaaatccaaaacggcgatatcgttatcattgacggtttagatggagaagtaattgtaaacccatcagaagaaactcttcgttcgtttgaagaaaagaaagcgaaatttgaagagcaaaaagctgaatgggcaaaattaaaagaccaagctactgtaacaagtgacggacatcacgttgagcttgttgcaaatatcggaacaccaaatgatgtacaaggtattatcgataatggcggagaaggcgttggcttataccgtacagaattcttatacatgggccgtgacaatcttccaacagaagaagagcagttcgaagcgtataaagcagttcttgaaggtgtaaaagaaggtcaaccagtcgttgttcgtacacttgacatcggtggagataaagagcttccatacttacatttaccaaaagaaatgaatccattcttaggataccgtgcaattcgcttatgtcttgatgaacaagatgtgttccgtacacaacttcgtgcattacttcgtgctagcgtatacggtaacttaaaaattatgttcccaatgattgcaactcttgatgagttccgtcaagcgaaagcgattttattagaagagaaagcgaaacttgtagaagcgggtacaactgtttctgattctattgaagttggtatgatggttgaaatcccagcttcagcagtattagcagaccaattcgcgaaagaagttgacttcttctctatcggaacaaatgatttaatccaatacacaatggctgcagaccgtatgaacgaacaagtatcttacttataccaaccatacaacccatctattttacgtcttgtaaaaatggttatcgatgctgctcataaagaaggcaaatgggctggtatgtgtggtgagatggcgggcgattcacttgctatcccattattattaggattaggtttagatgagttcagtatgagtgcaacatctattcttcctgcaagaacacagctaagcaagttgtcaaaagcagaaatggaaacattagcagaaaaagcattaaagatgtcaactgctgaagaagttgttgaactagttaaaagcatataattaataaaaaaacctgagccgatttgaaatcggtctcaggttttttctatgagaaaagtaaatcttatttgcttactattgaggataagagacagaattagatagcgattgcaacgatatcagttgggcatacgcgtaaaataccagtaaaagtatttcgattttgattgttcttatcgtctttattgttatctttgttatctttgccattacgagctaaagcagagaaaagagcaacaccgttacagaaaccttcaaaaattacattgttgaaagtaccattacctctaatgcttaaaagagaaagctctgttccaactgaaatgctagcaagtacgttacatacagctggttgttgtggtctaactacttctctctctttctcacgatggtcgcgatggtcacactctctttcacgatgatgacagtctctaaagttatcacagcatccaaatgatccaaacataatcctcatcacccccttcacacttataatctatgtaagttcggtagttagtgactggacagagagtggaattttttctaggggattttctcattttaaatgactagctgggtgtttagtatggaatgatgtttaaaataggggagatataacaaaaaatgtaaaaaccaccgaaataaatgaaatgggtagcctttacacttttttacttttatataaaacgatgatatatacgggaagagctaggagtaatggtacaatggatcgtgcagtgtgtttttctgattctaattggaatgcttcttcttttggaaattgtaaaatggagatgtttgcggcatcaccaataaaatatagaagcagtacagttactatgtaacataaaagtgcgataaagcttccgtatgaactcaatgaaaatccctctcttgttatctatttgttatcattgtatcacaattgtaacaaaaatacacgggtatatttcaatgccttaacaaaattcgacacgaaacgtcacgtttatttatgataagggaatagaatatacttttccataagtataaatgtcgaatgatttgtagtaatattacaaaagtatgacagggaataaaaaaacgaaggcaatgtagttgccttcgttttttattattttgcccactcgctcacttgctctacgctcatgcgaggtgcagggtggccttttaaagttgattcaccaattgtaataagcataattggaacgtaacgagatgaaacgttaaattcgtctgtcagtgcttgtgggttgaagccaccaatagcacaagtatcccaaccagttgctttagctgcaagcataagttgcattgctgctaaagatgcatttgaaaaggcagcatctcttgggaattgttcacgagcatatgcagattcaatatttttagctaagcgttcttttgcttcttctttcataaatccttgttctacaattggaccatatactggctcaacatttttataagcttctaaatcacctaaaatagcgactactgcagaagcatcaagaatttgttgttggttataagctattgggtgtaatcgtttttgtacatcttcaccttgaaaaacaaggaatttccagtgttgtaagttccaagcggaaggtgcttgtgctgcggcttttaaaatctcatgtaattctgtagatgagatttctttatttgggttaaatgcacgtgtagatgtgcgttcatatagaacatcaaaaaagttgtcgtttgtcattgtatatcctccaaattgtatatcgaattattttcaaaaaaataatatacactacttacattttgtaagttatcgaatttaagaatataatatctttattttaattgtcaagttttaaaaattagctagggcattcatacaaacgatacaattcctacaatcatacactaaaaaaggaatttatagagtgaaaagcgaagataacattctcaattagcttgttaatatgtatctctcacaaattaaagtttattggagaccagtcttttaaaaaagtttgtgaggaattcagtagaacaagatatatgaagtgagtgaagactagtgatgaacatactacattttttattagagaatacggttttccaaaatgtgttacaagatctgcagttaaatgtcctttatatagaaaatggatgtaagcatcaacaaacggtagaaaatatccatccaaaatgtatgtttatagcaaatagttttgaagagggcgaactattatttcaaagaacgaaaccacacattatcattacgtatgtaacagattattctcaaataaaatatataaagaatatgtatactccgcacagtacattcattgtcatttgggatcaacaaataacaaaagaatttacagatgtacttgcattaggaatacgtaatattgtaatagctcctgtaactccgcaagcagtgttagaggaagtgaataagagtttgtatcaactttctttagtaaggcaagttagtttgcagcaggaattgcttcaaacgatgtttgattttcaaaatgatctattatttatagtagaagatgatgaaatagttgattgtaatacaaattttttagcttttttcggatatgaaaatttgtttgcctatcgtgagcaacatttggtatttgctgaacattttattagagaaaatggatactactcgacgacgcatgatataacatggctagacgatactttatctagtggtagaagaattaagatgttaaattatgaaggggcagtatctacttttctattacgtgcgacaccattgccagaagatttatcaagatttattgtaaagtgcacggaaattacagaattagatgaaatctatcaagaacaagaaagacttgctatgatagattcattgacagagatttataatcgtttaaagtttcaacaaatactagaggtagaatgggaaaaggtaatacgtagtgatgagaaaatagcaatcattttatttgatatagataattttaaaacagttaatgacacatatggtcatgattttggcgatttagcattaatacaacttgcagagcttatgaaatctaaagtggagcagcaacatgtatttgcaagatggggaggagaagaattcattatattagtgacaaatacagtagaaaaggaagcatttcaagttgcggagtcattacgattctttattgaaacaaagcaatttactggaatttcgaagttaacagctagctttggagttgcgttatatgaacaaggaactacaagagaagaattaatgcaacgagcggacattgcattatatgaagcgaaaaaaaatggaaagaatcaagtatgtgtgtatagaaaagaaaaaatgtaatttttcgcaacaaattgttgcgatttttttttattgtttgataatagaataggggggataatttttagcgaaggaattatggaggatcaatatgataaaaaaagtaatggtgatggcttcactgtctgctatagttggcggcggagtatactattttcttgttagccccaatataaaggaaaacactgtattaacaactaaagtgaatcctactattgaatcggaagtacaagggaatatagaagaaaaagaagagcaacaaattgattatgctagcatatctcaaaaattagatcaatatttagtcggaaagcaatttaatggaacagttttggtaacagataaagagcatgttatattgaataaaggatatgggtatgctgatgttcaaaataaaatagaaaatacgcctcaaacaaaatatcgtatcggttctattacgaaaacagttgttgccacatctattttacagttgcaagaacaaggtaaattgaatattcaagataatgtaaataaatatattccttcatttccggagaataaaaatattacgctatatcatttattaacgcatacctctggtttacctgaacatgcgaaaggaaatgtgaatgctgcttcccgtttacagttaattaattggattggacgtcaaaatttagaatttcctgcaggaacaggttggagatatacagattataattatatggttcttgcttatataatagaacatatctccaaaaaacctttaggagattacataaaagaaaacatatttataaaagcagatatgcatgaatccggtatgggaaatatggtacctggagataaaaattttgcaaagggttatgtgaaaaaagataaagagcttgtaccagcgcagaagttaggcatggattggctatatggttgtggtgagatgtatacgacagttggagatatgaagaaattagacgaagcaattataaatggaaaacttctttctgaacaaagtatacaagcaatgttttcaccttcagcagaacggaaatatgcatttagtttttatatatatccagattattttcataatcatggtgtattatctggttggaacactttcaataattttaataaagaaaaaggaacttttgttatgttattttcaaatgtgaaaaatagtatggatgatgactttaataaagagttccgaaagatggtaaatgatttattagaacaaaggggatgagaaaatggaacataaaactttatcaataggtttcattggtattggcgtaatgggaaaaagtatggtttatcacttaatgcaagatggtcataaagtatatgtatataatagaacgaaagcaaaaacagattctttagtgcaagatggtgcaaattggtgtaatacgccaaaagagttagtgaagcaagttgatattgtaatgacaatggttggatatccacatgatgtagaagaagtgtattttggtatagaaggaattatagaacatgcaaaagaaggtacgatagcaattgactttacgacatctacacctactttagcaaaacggattaatgaagttgcaaaaagcaaaaatatatatactttagatgcacctgtctcaggaggagatgttggcgcgaaagaagcaaaactcgcaattatggtaggtggagagaaagaaatatatgatagatgcttacctttacttgaaaagttaggaacaaacattcaattacaaggaccagctgggagtggacaacatacaaaaatgtgcaatcaaattgccattgcttccaatatgattggagtatgtgaagctgttgcttacgcgaagaaggctggactgaatccagataaagtgttagagagtatttcaacaggggcagcaggtagctggtcattaagtaatttagctcctcgaatgttaaaaggagactttgagccaggattttatgtaaagcattttatgaaagatatgaaaattgctttagaggaagcagaaaaattacaattaacagtcccaggcttaagtttggcgaaagaattgtatgaagagttaattaaggatggcgaagaaaatagtggaacacaagtattatataaaaaatatataagggggtaaacgaggtggaccttcaaaagtttgatgagatgattgatactgtacagcgagctacttgtatgcaaattaatgaaagacaaaaagaagcttttaaacaaaaatatgattttgaaccagaatttgaatatggaagagatgagaaggggcattatgtaattcgaacctcaaaaaagatgttagaagaaatggagttttatttagcattgaaatatgatcgtgatggagtggatctttatatgcaagctgagattgacggcatattttatgtatctattagctatggtgaagatgccctacatctacaagaattgtttcaatttctagaagaaaataaataaaagtcctcaaatgaggacttttatttatttagtcatctttaatttttataattataagttagaagcccggcggcatcgttcaaccgggaacgggataatttgtgcgatgtgattagggccaaattgttttgtacgagcatggcgtattatataaaaagcacacagaattgaaacaggaatagcgccgaataaaccaaataataaagcgcttacacaagatgcgacaaatcctaaaacaccaatttctaactcttccataatagctcctaaaataacaggaaatgctccacatgtaactccaagtataagtgcgataagtaagctcatgattatccccctctgtttgcgatattattttccttcttagttaattgtagtatatcacatataaaacagaattttcagaaaaaatttaataaatgttcaaaaaatgttcgaaaaatgcacttgaaaaatcaagatgttaaatttgtgatgaaatagtactttcaagtaaataaaaaatcaggcttatttcaaaatgaaataagcctgttccataggaggatgtatatatgtagagtgaataaaagtttggaaaagggggtccaagtccttttattcaactaactaccttaatagattggaacccagccttcagttgtcacaaaaatacgaatagctacaacttggcgatcatcttgcaaggtaaaataatgtcttgcattttcaggaacagatattaaatcgcctggctcaagttcaacatcaaagaatttcccatctttaccttcaatagcgaaaatgccatgaccactgacgataaagcgaacttcgtcatctgtatgatggtgttccttttggaaattaattaataattcgtcaaggttaggggtgctatttgaaagtgaaattacatcatgtgctttataaccacggcgtgctgaaacatcagcgatttcttttgaaaacacagctaatatttcagctttgttttcatctgttaacgaataattttcatttaaatgagtaggaagtttagaaatattccatttctcatataaaacgccttcctcttgtagaaatttagatacttccacttcattttcaatacgagtatttacttcatgaatacgaatttgcgccattagaaacgcctccttgaattgataatagttttatatgaaattggaataaaaactcataagcttctaatctcttctttgcatcaaagctatctcggccccatacagtaataccgtggttacggattaatactgcacccgaatctccttgtatatgctttcggaagttttctccaagcgttgggatatgggcatggttttcaataataggaatttgaattgttgcaccttcttcccaaatatcgagtgctttaataatttcttgattttgaagggtgactgcatcactatataaatttgtgatgacattattatcagttgtatgaacatgaagtacgcacccggcattcgtattgttataaatgtgtgtatgcaatattgtttctgctgaagggcgtaattcagtctctaaaacgggaactcctacatgatctactaatagaaaatcatctggagtggtttttgttttatctttaccgcttgctgtaataagaaaagtaagtggttcatggctaacctttatagaaatattaccacttgttgctggaaaccaatttcgtgttgttaactctttttttaactcgcttaagtcataccattgacgaaaaagttgtttcatgccttcacctccaacaaaagttttaattcagcttgcacatcttgaaatgtttcaaacggtgtataagcaatatgattttcttcacactttgtaataagaaaatcgcgagcgaatactttatcagcttgtttcgcggcttgtaaatcagtaatagaatctccaattacaatatgaaagtcatttgtatcacttaatttacggattaatgatgatttacataatccgcaatgattttgacaatgatcatcacaagaatgaggccatttaactgtaataaactctgctgaaaagtctgtttcattacaataaatttgctcttttggaatgattccttgtaagagtggatagacgaagaaatccattccacctgatatcacgtaaaaagaaatgttattttcctttacgaattgtataaactcatgaaaaccactacggatttcagcagtttctattaaaaattgaataatatcatcgtgcagattagtaggtattaattgaaataatcgagaaacaccttcttgaatggatagttcttgtgataaaattttattctttacttcttcggcttctggtggtgcgaatttttccataatggacataatgttatcattatttgtaatcgtgccatcgaaatcacaaaatacttgaatactcataatttcacctcataagagggatttccccatatttgtagtgcactatgcaaatttatgtcgtctacttcatggagtggtttattttgcaaagtagcatcaattgcagtacggaaagctttaccgccgccttgcgctccatttggatgtccgtgtatcccgccgccagcattaataacaacatctttaccgaaatctcgtacaataaagggaacgaaaccaggatgaataccagcagacggaacagaaaagctcttcttgaaaaatgcatcgtcttcagttaaatattttgagatagcaagagcctcctctttttctagcgcaacacttccgtatggagatgggaataatgaaaagtcagccccagcataacgtagtagctttccaagtaataatggtgatgaaactccatataacttggatgctgaataagcaccacttacagcaggatgtgccataataggaactgggatttcatcatcttctgcaagtgattgtagtacatctagtccgtaagcaaatacgttaaataatagaatatcagctccagcttgcactgcacgtttagcattttcttttaaatcaaaagttcgtcctgttaaatttaaggcatataacgttttatgaccgtatgtttcgtagacagattgtaaaacttcttttccagatacaatgcgtttcgtaagtggtgttaatgcattttcaaataatatttcatcatcttttactatatctacaccaccaattgcttgatcgcgtaattgtgtttttaaatacccaatgtttcgtccaatcattcctttaaaaatactcattaaaaggggacgatcatgcacttgtaaaagatttcgaataccatctatcccgaattttggaccaggaaaatgtttttttaactcgtctgaaaaagttaagtcaattagttttacttcgccatcaagtgatagctttccaaatgtagtcgttaaaatcgctggtaaatctggactgaagtttaatagcggatattcgattttaataattccgcgttttacttttttacgtaaatacgaattggtatattcatgttcagctaattcctcaacatgaatgacgttgcctttatgctgctttaattgttcttgcaataagtgtggcaaatgagtccaagagccaattgttaaaccgagtgcaatttgctcagcttttttttctaagttatgtgaatcatcatggattaaatacgtcgctataattccgctcattgttataacctcctagttaaataaaaaaacctctcagctaaggagaggtttttttacaaccagctccttatctgtcagcgtaatgctgcgagaattagcaccgtgtctacaattgtagatcggttgccgggtttcgtcgggctcgtccctccacctgctcttgataagaagtatttagaaatgtttaaatttttaagataactgaattttgtcagatatttttcgtgttgtcaattactttttgaaaaaatttaatttatcaattcgattaatggcttcccgtaatctatcttctgcatgcaagagaccaacacggacatacccttccccatgcttaccaaatccaacaccaggagcaactgcgacatgtgctttttctagtaaaatatcagaaaattgctcagaggtatatccttttggaacgggaagccatgcaaagaatgatccttttggaatgtctacattccaaccaattgagtgacaggctgaaataagagcgtttcttcgagattcgtaactatttacaaggtctattacgcaagactgtgaacttaatagcgcttctcgagcagcatcttgaactgcaccgaatatactaacatacatatgatcttgtaataggttaattgtttcaatcacactttcattccctacagcaaaagcgatgcgccagccagccatattgaaagtttttgataatgtgtaaatttcaattcctatatctttcgcaccatctgcttgcaagaaactaacaggtttttgaccatcaaatccgatagcgccataagcaaaatcgtgaacaactaatatattatgtttattagcaaagtgaatggttgcatcaaaaaaatcttttgatgcagtagcaccggtaggattatttggatagtttaaaaacattaattttgcacgctctgcaatagagtcatcaatgtttgtataatctggtaaaaagttattttctgcaataagcggcattgtttcaaagtgtgcttttgctaaagcaaccccggataaataatctggataacctggatccggaacgagaatcgtatcaccaggatttgtaaaacaaatcggtaattctactagtccagccttcccgccaaacaaaatagcaacttcagtttttgggtttaattcgacgccgtattcacgtttatagaatgtagccacggcttcctttaagctttcatgtccgcgaaatggcggatatttatgatgaatggtcttttcggcagcatcttgtaaagcttttacgatatgctgcggtgttggttgatctggattaccttgacctagattaataacatcgtgaccagctgcaacgactttgttaacttttgcaacaagtgaagcgaaaaattgtgttggcaatgatgttactatctcagaaggttgaaataatttcatactttccacctcttttgaaagttgttacaattctagtgacaaatgatataatctttccagtattttgtaaagaaaaaaataagaatggggctgaaaaaatgaaagtcgcatgtattcaaatggatattgtttttggagatgtagaaaaaaatattgagaatgctaaaaataaaataagcgaagctatgaaggaaaggccagatgttatcgtcttaccagaactatggacaacaggatatgatttaacgagactttctgaaattgcagatagggatggagtggaaacgaaagaaaagttaatagaatgggcgaagcaatatgatatacatattgttggtggttctatagcaaagcaaacagagcaaggcgttacaaatacgatgtatgttgtaaataatgaaggacagctagtcaacgaatatagtaaagtacatttatttcagcttatggatgaacataaatatttaatagccggtaatggtacgggcgaatttaagctagatgatgtcgaatgcgctggaacaatttgttatgatattcgttttccagagtggatgcgtgtccatactgctaaaggggcaaaagtattatttgttgtagcagaatggccattagttcgtttagcacattggcgtttgctattgcaagcaagagcagttgaaaatcagtgttatgttgttgcgtgtaatagagcaggaaaggatccaaataatgtatttgcgggtcattctttaattgtggacccttggggtgaagttgtagtagaggcgaatgaagaggaatcaattttatttggagagcttgaattcgagaaaattaaagaagtacgtaaaggaattccggtttttgcggatcgccgtccagaattatacaaataaaatgttgacaagtgatttttattcttggtatagtcttcaacataaagttaaaaattcaaaaaattatacaactcttatcaagagcaggtggagggatttggcccgatgaagcccagcaaccgaccgtaataccattgtgaaatggggcgtttattacgccaaaaggcacggtgctaattccagcagaaagtaaaaccttctggcagataagaggggagaagataaacttcaaacctctttcttagtggaaagaggtttttctatgttagaaaaacctctgaatttaaaaagggggagaagacgatgggatattattcattaacagaaataacagctgtacaatatgcgaaagatcatggctattttgaagcgaaggcaaatgtcgtttgtcatgaaattggagacggaaacttaaattacgtgttcaaattagatgatggagagaaatcaattataataaaacaagcactgccttatgcgaaagtagttggtgaaagctggccattgtctataaaaagagcaacgattgaaagcaaggcattacaaatttttgcgcagtatgtaccggattatgttccagtagtgtacagtcatgatgaagagttagcgataacggtaatagaagacttatcaagactaacaattacaagaaaaggattaatagacggagaagaatatccgcttttatcccagcatatcggccgttttctagcacatgttttattttatacttcagattttggtttacagtcagaagagaagagggtactagaaggtacctttgtaaatccggacctttgtaaaattacagaggatttagtgtttacagatccgtttggacattatgatacaaatgattatgagccagatttacagctcgtggttgatgaactttggagtgataaaactttaaaactaaaagtagcacaatataaatataagttcttaacaagaaaagaaactcttattcatggtgatttacatactggtagtattttttcgtcaccttctgaaacgaaagtgattgatccagaatttgcgacatatggcccatttggatttgacataggtcaatttattgcaaatctattattaaatgctttatctagagaagaagaaaaaagaagtgtactatttttccatatagaaaagacgtggagttattttgtagaaacttttacaaagttatggattggagaaggtgtagaagcatatacgaaagaaaaacaatggttaccaattattttgcaaaatatctttactgatgcagttggatttgccggatgtgaactgattcgtagaacaattggtttagctcatgtagcagatttagatgaaatagaaaataaagaaacaagaattcaagctaagaaacaagcgctatccttaggtaaagaactaataaaatatgaatctaaaagtgctgatattcaactgtttcgaatattatttcaacagacagtttcagggggcgtaaaagcgtgagtacaattgttactgttccgagatctgtaagctggaaaggtgatgcaattgcggtattaaatcaaacgaaattgccgcatagcacagaatacaaaacattgacgactattgaagaggtttggaaaagcatcgtaatgttagaagtacgaggagcgcctgcaattggaattgtagctgcatttggcttggcgcttgcatcaaaaaaatataacactgtacatattgaagaatttcaaaagaagtttaatagagattgtaattatttaggaacgtcacgcccgacagcagtaaatttattttgggcaattgatcgtatgagagaatctattcgagagattactacaataaaagaagcacaaaaaacattagaagaagaagcgcttcgcattcagcaggaagatgaagaggtgtgccgaaatattggggaatatgcgttaacatgttttaaagatggcgataatattttaacaatctgtaacgctggaagtatcgcaactgccagatatggaactgcattagctcccttttatattggaaaagagaaaggtgtgcgtttacatgcatatgcgtgtgaaacgagaccagttttacaaggtggtcgcttaacgacctgggaattgaagcaagcaaatattgatgtgaccccatgcccatcaacttaaggatagaaactctacggttttccattaattgaaatgaagcaaagcgtgaattaggctgggaggcaacacgcggattagaagaaatgtgtgctgactcttggaaatggcaatcaaataataaaaatggctatttagaagtttaatgatgaatataaaaaatgacctttgcataaaagcaagaggtcattttttatattcattttctactaagtttattagcgaacctagaaaagaacgttcgctgttttaaatgatatgattttacaatatcttatgctagaaggtagtagaatgagatagagtaatgtattattttattaattttttatgggaattgaaagcgtattattgaaatgtattccaacacttgtatcattgctagagtccgtttataatcaaggaatcctagttcatgttttgataggagtatttattattgaaagcgttttaagttcactccttttttgaggtaggaggtctgacttatttaggtgaaaaattatgtatgtagttttaaatgggaagaaaaataatataagtatcattttatagtgtggggaggttaaaagtgtgaaaggtaaagattttcacacgaatatatatgggttatgtaggattattactttcaggggcagctttatttttaaatagtcttgttatattagggaaagcagagatgaaaagtgcgggtgtttttaatttatttgtgggtgcactacaaattattattccgttttatttgattatgatttctgaccaaagcaattggacagtgtattcatatgcggctactttcttatttggattaacttatttatatgtaggtgttacttttataaaaggaatggatagtagtggtctaggatggttttgtatttgggtagcaattatagccttattctatatggttgtttcatttgttcaattccatgatgttgttaatgcgttaacgtggtttatgtgggcattactttggtatttattctttgtattaaatacacaaaagaagaacattaatcaatatcttggaaggattgccttcgtacaatcatgggtaacattgactttaccttcactcttttattttatgggagtgtggggagagggattcgtatatgaattatgggtttatgtatctgtaatttctattttatacttctgttattgtatttataaatatcgagtacgttaatatattatctgtataaaggcatggaatcgttaaacgaattccatgctttttatatgttagcacttataatagagaggtagtattttacaatttgctaaagtggggatgatgaagttgaaaaaagtattggtgctagggggaacaagattttttggtaaacatttagtagaagcacttttgcaagaggggcacgatgtaacgattgcgacgagaggaattacggaagattcttttggcagtagagtaaaaagacttattgtagatagggaagatgaaaaacaactagcagagcgtctaggagataaaagttatgatattgtatacgataatttatgctatagctcgaatgcagcgaaggtaatatgtgaagtgttacgagggaaaacgaagaaatatgttatgacatcttcaatggccgtctatgaacctgccctaagcttatcagaagaagactttaatccgtacgagtatgcaatcgcgtatggagataggaatgacttcaattatggtgaaggaaagagattagctgaagccgttgtatttcaacatgcaacattcccagtcgttgcagtgcgttttccagttgttattggagaaaatgattatacgaaaaggttacaattttacgttgaatgtattgtgaaccaaaaacctatcgttgtggatcatgtagatggaactttgtcatttatacatgaaaaagaggcaggagagtttctagcttggtgcggaatggcaaatgtgagaggaccaattaacgcctgtagtaacggagcagtttctatggaagaaattattcatttcatagaagagaagacaggaataaaagcactcattcagaaagctgggggaaatatagctccttataatgaggtaactaactgtacgttacataatggaaaggctcgtgaattcggatttttgttccgagagctgaaactagaaataaaaaatattttaaaacattatataaatacaatgaagtaatcataaatcccccggtggcaatccgggggattctggaggatttcgacaatactgattttacattaccaaatttaccttatacgtacgactaatgtttttgtgattgaattgcttgtaaatacttctcgtttacttggtcccagtttactgtatgccaccagttggtaacaaactctgggcgcctattttgatactttaaataataagcatgttcccatacatcaattacgagtaaggggattttcccttcttgcaaaggcgtatcttgatttggtgtactcataacagagagttcctcaccgtcaagaacaagccatccatagccacttccaaaacgactaatagctgctttggaaagttgatcttttaagttgtcaaaggtattgaaataataatcaattacttttgcaacgtctccattaggctcaccgccacctcgtgggctcatcacttcccaaaaaagactatgacaatagtgaccaccgccgttatttcgtacagctgtaacaatttccttcggtaaagcatctaaattacatagcaattcttctaaagatttattatgtaattcagtataattttctaaagtagcatttaaattgtttacgtatgtcgcatggtgctttccatgatgaatggcaagtgtattgctatcaatatgtggctctagttcatcatagtcatatgaaagctttggcaattgaaatgaagacataacattccctcctttcgacttaaaaagttggtctaggtaaaaatactttacctgagtcaaaaatacacccattttccatataagtcaatagtaattccattaattttctgaaaaatattacaataaaagtaacactctcactttcatttgtgactcctatcctttttgcttatactgtaaagtagcagggttttgttgaaatagaaggagattgtttatgagtaaaacgaaacaattaatagaggaagcaagtaattttattacgatttgttataaggagcttcataaagaacaattgatagcagaacgtataaaagaaattcaaattgagatagagaagacagggacatatgagcatacatttgaagaacttgttcatggttcacgaatggcatggcgtaacagtaatagatgtattggaagactattttggagtaagatgcacatattagatgcgcgcgaagtaaatgatgaagagggtgtatataatgcattaattcatcatattaaatatgcaacgaacgacggaaaagttaaaccaaccattacgatttttaagcaatatcaaggtgaagaaaataatataagaatttataatcaccaattgattcgatatgcaggatataaaacagaaacgggagtgattggtgattctcattccgctacatttacggacttttgtcaggagcttggttggcaaggagagggtacgaattacgatgtattgccacttgtgttttctatagatggaaaagcgcctatatataaagaaattccgagagaagaagtaaaagaagtgccaattgaacacccagaataccctatttcatcacttggagtaaaatggtatggtgttccaatgatttcagatatgcgtttagaaattggcggtatttcttatacagccgctccgttcaatggatggtatatgggaacagaaattggggcgcgcaacttagcagatcatgatcgttataatttacttccggctgttgcggagatgatggatttagatacatcgagaaacggtaccttatggaaagataaggcgctaattgagttgaatattgccgtactacactcctttaaaaaacaaggagttagtattgttgatcaccatactgctgcacaacaatttcagcaatttgagaagcaagaagctgcttgtggtcgtgttgtaacaggtaattgggtatggcttattccaccattatctccagctaccacccacatttatcataaaccgtatccgaatgaaattttgaagccaaatttctttcataaatgatatttagtgtagtttttttctgtgaaatataatttttttaattactgttatgtagcaaatggaagcctttactctcggttatttttggaagaggctttttgaaccaaggagttccttatgttataatcaaatttctgtttcgaagaccttatagaaatataaggtcttttgttttgcttttttatgtaagaggaagagattctttctttttaataagggatttggcatatttttagggacaacataagtatgtgggaagtcgataaaatgttatgcatatataattattgtgttttggttttaaacaataaaacataataaagttgtttttttagattgctgaggaaggaggaagtgtaaatgaggatgaagagtcgaaaaactgattggcctgtatttattattagtggtggttcacttttattatttgtaattgcagtttttttgaacaaggattatgtagagagtgcgattaataaaagtttcgctttttcaattaaatatttcggtgccttctggcaagttttattattaggtacatttattgttgcgatgtgtatggcgttctccaaatatgggagagttaagcttggaggattagaaaaacctgagattagtacggcaaaatggcttgctattattatgtctacattacttgccggaggtggcgttttttgggcagcagcagagccaatgtatcatttgatgacggtgccaccaatacatgatggtatatctgctggaacgaaagaagcagttatgcctgctttagcacaaagttatatgcattggggatttttagcatggacgattttaggtacaattagtgcggtagttatgatgtatggacattatcataaagatatgccgctaaaacctcgaacgcttttatatcctatttttggggaaaaattaagaaagagcctgcttggaacgataattgatgcagctgcaattattgcagtagctgcaggtacaattggcccaattggatttttaggtttacaagcaagttatggattacaagaattatttggaatttctaatgtgtttactactcaattagcaattattgtttgtgtggtggccgtgtctaccatatcggcagtaacaggtattgataaagggattcaaattataagtaatttaaatgttagattggcaattgtattaatggcattcatattactatttgggccaggtggatttattattgattcgtttgtttcttcgtttggattttatgtaaatgagtttataccgatgagcacataccgtggtgatacaagttggttaggatcttggacaatctttttctggggatggtttattggatacggaccaatgatggcaattttagtgagtcgaatttcaagagggagaacgattcgagaaatcatcgttgcaattggaattatcgcacctattattacaacgttttggtttactatattaggtggatcaggcgtgttttatgagttgatgaatcctgggtctatctcggacgcattaagtgaatctggtatgccggcagctatgattgcaattacaggacaattgccactttctaatattattggaccagcatttcttttattaacaattttatttgtagtgacaacaggggattcaatggcgtattccatttcaatggcagtgactggagacggagatcctagaattagtttgcgaattttttggtcgcttattatgggcgcagttgcagcaattcttttatatatgggtgaaggaagtattaatgcgctacaatcgtttatcgtggtgacggcagttccggtatcaattttgttattcccaatgctatggttagcgcctaaagttgcgggagaattagcattaaaacaaggtattgtaaaagaagaagataaaactgcattcttatttcagaaggctagtaaatcaaaataaataaaaacgtaaaagaggaagcatcttaaataagatgcttcctcttttacgtttaatctaatacttttccctttgtttctggtacacatagtagcattgtaattaacccgattgggtagatgataaaaatcaaggacaatgctccaagtaggttgccacctgtagcgagtaagccaataataacaggcccaaatccagctaacccacgtcctgtaccgaaaataaagttttcagcggtagagcgagcttcagcaggatagttttcagctaaaattgctccaaatcctcccatcattccatttgcaaagaatccaagcaatgcacttccccataataataatgttgaatctgtgaataagaagaagtaaatgagacagtatgctgtaccgccaatataatagattgcaaaagttttacggcgaccaattttatcagctagaataccaaagattgcaattccaattagcataccgatggtagaaatgaacatccagccacttgcttttgctaatgtatagttatatttatttgctaaaatagtgggcatccatgtgaagattccgtaatatccgaagttttggataaacgacataataataagaccaattgttgtaattgttacttttttattggcaaataactttcgaagtgggaatttttttatatgttttagttgttctgcttcagtagttgttaatttacctgtagcttctttttgcaacagttcctttttgtagcgttgtttttgctcccatattttcggttcacttaaacttttacggacatagacagctagtaaagctggaattaatccaaataagaaaacggctctccatccaaagtgtgggacaataaatgctggaaggagtgaagcaatcagtacaccaaattgccatccaagtgcaacaacagatgtcgctttagcgcgcatttctttagaccaggtttctgttacgatggccattccgattccgaattcaccaccaactcccattccaactaaaaagcgcagaattaataattgccagtagtctgttgcgaaataaatgagtgcggttgctagtgaaaacagtaagattgtgaaggccattgtacgaatacggccaaataaatcagcaataaatccaaataaataagaaccaattaacattcctattgtggtagctaaagttaagtttccaccttcaacaggacttaagtgaaactcttttaaaatatagacaagtacgaaagataatagcaacatatctaaaccttctgctgcatatcctagcgcagaaccaaataatgttttatatcttttcgcttttgtctcctctgttgtttgttgtacatcagtagtgacgttcattattactcctccttattttctacagtcgctatggaagaataacaaaaggccttctcacctgatatgatgagaaggccaaaaaagcatacgtatccccaaaaaagaacatacgtatattgtattccgacttccttctcaacctcacggggttgggttaaaggactgtattatattactttatttttagcactcttctattgtattgtcaaataaagaggaagttattatgtgtaaaatatttcaaaaaacatttcgttcttcttgacgccgacttcattattttcccataataaaactaactaaataaaaaggaatgaatcaaagatgctaaatttagtactcatgatgatcgaacgagtcggacttatagttattttaggatttttactctctcatattaaaactttcagacgcctccttcataaacaggatggctatgtagataagctgaagcttatttgtattttttcggtatttacaattgtaagcaattacactgggattgaaatagcaggaaatacgattatgaatgaaaactggttacaaggtgtttcttcgtcaagtacaattgcgaatacgcgtattatgggtgtcggtattagcggcttacttggtggccctatcgtaggggttggagtaggatttattgctggtattcatcgttatatgcttggtggtacgacagcgctaagctgcgcaatctcttctattttagctgggattataactggttatattggatatattttcaaaaaatataatcgtacaattactcctaagttttcagcagttttaagtgtttttatcgtatctttagaaatgctaatgattttattaattatagaggatggaattagcgttgtgaaaacaatagcgataccaatgattcttgtaaatagttttggaagttttattttactttctatgatacaagctattttgcgtcaggaggagaatgcaaaggcacttcagacccataaagtattacgtattgcagataaaacgttaccgtatttccgccaaggcttaacagaagaatcatgtaagcatgtggcacaaattattcaccgttttacaggaacagatgcggtatccttaacagatacagagaaaatattagctcatgttggattagcatcagatcaccatattccttcacatagtttaataaccggtttgtcgaaagaagtgttaaacacagggaaaataatgaaagcgaaatcacgtgaggttattaattgtcaacatgaaggctgccctttgcaagcggcgattgtaattccactaacttcgcatggaaatacgatagggacattaaaactctatttcaaaaatcctaaccagttaagtcgtgtggaagaggaattagcagaagggttagcaaaaatattctccacgcagttagagttaggagaagctgagttgcaaagtaaattacttcaagatgcggagataaaagcattacaagcgcaaattaacccacactttttatttaatgcgattaatacagtatcagctctatgccgaacagatgtagaaaaagcaaggaagttattattacagcttagcgtatatttccgttgtaatttgcaaggggcacgtcagttattgattccactagaacaagaattaaaccatgtacaggcatacttatcactagaacaagcaaggttcccaaataagtatgaggtaaagatgtatattgaagatgagctaaagacaactttagtaccaccatttgttcttcaactattggttgaaaatgcattgcgacatgcttttccgaagaagcaaccagtatgcgaagtggaagtgcatgtttttgaaaaagagggtatggttcactttgaagtaaaagataatggacagggaattgaggaagaacgtttagaacaattaggaaagatggtagtttcgtcaaagaaagggactggaacagctttatataatattaatgaacgtcttattgggttatttgggaaagaaacgatgcttcatattgaaagtgaattaaataaagggacggagattacctttattattccaaaaaaagtaggggaggaagagccgggtgttaaaagtattagtagttgacgatgaaatgttagcacgtgatgaactaaagtatttattagagagaacgaaagaagttgagataattggtgaggctgattgtgtggaagacgcattagaagaactaatgcaaagtagaccagatattgtgtttttagatattcaattatccgatgataacggatttgaaatcgcgaatatattaaagaagatgaaaaatccacctgcaattgtatttgctactgcctatgatcaatatgcgctgcaagcatttgaagtagatgcgttagactacattttaaaaccatttgatgaagagcgtattgtgcagacattaaagaagtataaaaaacaaaaacaagcgcaaatagaaacgaagcacgaaataaaggggacagatgtaacagcagagatgcataaattagcattaccaattgaagaatcaatcgtacttgtgaatattgaagatattatatatgtagggcttgtagatgggaaagtaacagtaaaaacaacgagggaaacgtatgtaacacatgatacacttgtaattttagagaagaagttaccacaagcaagcttcatgcgcgtacaccgtagctttattgcgaatattaatcatattactgaaattcagccatggtttaattctacttataatttaatcatgaaagaaggatcgaaagtacctgttagccgtacatatgcaaaagaactcaagaagctgcttcgtatttaagaagcagcttttgtatttcatccttttatatttgtaactgattctgtatatttgacgttctgttatgtaaacgcttacttatacgtttgtatcctatacaataaaggtaccaaatcgaaagaggtggccaaaatgagtacgaaaaaagtatatagtttcttatcacaagcattcatattctcagctattatgttaatttctaatattattgcaacacatttaccaattccaatgccttcatcggtaatcgggttagttattttatttagtctattatgtttaaaagttattaaattggagcaagttgaatcactcggaacagctttaacaggtattattggattcttattcgtcccatcaggtatttcagttattaattctcttggtgtaatggggcaatactttgtacaaattttaactgtaattgttgtagcaacagttattttacttgctgtaacagggttatttgcacaatttattttaggaaaagatgaaaaagaaacagaagatacaaaagaattgaaagtagtaaataaaggacgcaagcacggaaaggttgcgtaaccattgcatttatatattgttaggaggtaatgaacatggcaagcacaatgactccatatttcggaatcgtcgtttcattaatcgcatacggaatcggaacattattattcaagcattcaaaagggttcttcctatttacaccattattcgtagcgatggtattagggattgtctttctaaaggtaggtaactttacttttgaagaatataatactggcggaaaaatgattagtttcttcttagagccagcaacaattgcatttgctatcccactctataaacaagttgataagttgaaaaaatattggtggcaaattttatcagctatcgtggttggatctatttgctcagtaattgtcgtgttcattgttgcaaaagcaatcggtttagatacagcagtaatgaattcaatgctaccacaagcagcaacaacagcaattgcgttaccaatttcagaaagtattggtggtattccagcaattacatcgtttgcagttattttcaacgcagttatcgtatacgcattaggagcattattcttaaaaacatttagagtgaaacatccgattgcaaaaggtttagcacttggaacagcgggtcatgcattaggagttgcggtaggaattgaaatgggtgaggtagaggcagcgatggcaagtattgctgtaacggtagttggagttgtaacagtagttgtcatcccaatgttcataccattcattggatagtaaaacttacttaaaaaataagaaaagcaagctatttgtaggacagatttctactgatagcttgctttttatgttacagtagtggtaagacctatttaaaaaaatgtaagtttccttaaatcttcattaatactatgtagaatacgttttgaattaggtcattgtattgtaaaataagaagtaagctactatatacctgttaaggtaggcatataatgagtttataaaaatcttaatatgaataataattaaaagtagaaaaaagagagaaatctacttattaacgttttagtttataggacaggagagagtattcgtcgattatgcaaataaaaaacctgtttcaaagtaaaggattccagaggttactcgtattagtaatacttgctctcgtgttatacgggctgcaaagtatgttgaatttaatattaattacgtttattctcacgtatttaatggatcgattccaaaagtttatttcccgcaaattagatcatttcatgcctattaatcgaaaaattattatagcgtttctatatgtaatgttaattggtggaattgccattacgctatttaaatatttaccagtattaacgatacaaatttcacaattgatttaccaattcaatgtatttttaagaaacccaccagatagtgaactaattaagtatgcagttaatgctgtcaatcatatggagctttctaaatatgtaggacaaggcgtagacattttgtataaatcaattacgaatgttggtaaatttggccttcaagttttactttctttaattttgagtttgtttttcttattagaaaaatctcgtattgtcggttttactgcaaagtttaaagaaagcaggcttgcaattttctatactgaaattgagtacttcggaaagaaatttgcacgttcatttggaaaggtaatcgaagcgcaatttttaattgctgttgttaactgtgttctttcagttatcgcattatggatattaggatttccgcaattattaggtttagcattaatgattttcttgcttggattaattccagtagccggggttatcatttctttattcccactttgtatgattgcttataatattggcggtattatgtacgttgtttatattttgattatcgtaacagtgattcatgcgcttgaaagttacgtattaaatccgaagtttatgtcgcaaaaaacaaatttaccgattttctatacttttatggtattaattttctcagagcacttcttaggtgtatggggactgattatcggtattccaatcttcattttcttactagatgttttagacgtgacaagtgatgaaatggagaaggatgttggaaaaaataaagtgaagtagagaaaaagcatcgatgttcgatgctttttcttttataacattatgtttcttatgccatactgtaaggagaatatagaataggggtgaagtaatggctgtaaatgaaaaggtagaattggctacatttgctggagggtgcttctggtgtatggtttcgccatttgaagagatggaagggattataaaggttgtttctggctatacaggtggtcataaagagaatccaacgtataaagaagtatgttctgaaacgacgggacattatgaggcagtacaaattacatttgatgcaaataaaatgccgtatgaggagttattaaatatatattggagacaaattgatccgaccgatattggggggcaattccacgaccgcgggcagtcttatgaaacggtgattttttatcataatgaagaacaacataaaaaagctgaggcctcaaaagaagggcttgagcagagtggacgcttttcaaaaccaattgcgacaaaaatactaccagcagctacattttatccagctgaagaatatcaccaaggatatcataagaaaaacacattccgctatgagttatatcgtaaaggctcaggacgagatgcttttattaagcaacattggccaaaggatactgctcatttaaaagaaaaactcaatgagatgcagttttatgtaacgcaggaaaatggtacagaaccaccatttcgaaatgagtattggaaccataaagaggaaggtctttatgtagacatcgtttcaggtgagccgctatttacttctctagacaaatttgatagtggatgtggatggcctagttttacaaaaccagttatgtcagcaagtgtgaaagaaaagatggatgtgagtcataatatgacacgtacagaagtgaggagtaaagaaggagactcacatcttgggcacgtatttccagacggtccaggaccaaatggccttcgttactgtattaattccgcagctcttcgatttattccaaaagaggaattagagaaagaaggctatggcgatttcctaatcttgtttggaaataaaaaataacctcgcagttagcgaggttattttttattattttgtttttttctttttaaatttgcttaatatttcataaacgattggaacaataagaagtgttaataacgttgaacttgttaatccaccaattaccgttacaccaagccctttagaaattaagccactaccttcaaatcctaatgcaagcgggataagagcaccgattgttgcaattgcagtcattaaaattggacgaaggcgtgttgcaccagcttctaataaagcttcacgtgttgatagtccttcattttctttatgaataacgcggtcgataagcacgattgcgtttgttacaacgataccgattaacataagcgcaccaatcattgcagatacacttaatgtttcaccagagattaataaggcaacaagagccccaataattgtaaatggtagcgagaataaaattgcgaatggtgcaagggcaccaccaaatgtaacgacaagaacgaagtatacaatggcaatcgcagctaacatcgctaggccaagttgcttaaatgattcttgaatatctttagtaacaccgcccatagaaacatctacaccagaaggaagatccattttatctacttctttttgtactgcagcagatgcttttgaaacgtcatcagatgttaatttggcactaacctctgcataaacacgtccatctcggtgtgttactgtattcgatgtttcaccttcttttacagtcataacatctttcacagctacttcattaccaagtggtgttgtaattttgcgatttgttaagtcatcgattgtttcataattttgtttttcagcttctacatatacattgatatctttaccgtcttttttaattgttgtcagaacagggcgatcatgttgattagaaagtcccattccaatttgagcagccgttaagcccattttactcagcttttcttgatctgcgactaaagtgtactctgcatatgtttttgcaatactagaatctatatcttttaagtctttatttttcttcatgatattttgaatatcttttacgacaggcttaatgtcttctgagctatctccgtaaacgtatagtttaatttcgttactaccgccacttgctccgaagtcttggtttttccattcgcctttgccagacatcttctgtaaatctttaacgacttgttctttctctttttcaaagtttttcgtgtcgttatcatattgcacgaagaacattgcttggtttgattgaccaggactcattggattctctccacctaatgagaactgaattgttttgacgtttttattatcttggaagtgcttctcagcttttgttgcaattttttcaacgtcttctaacgtttgacctggttcaggattatatgttgcaataatcattttttcttcttcagaaggtaagaaacttacaccgataactggtacaagtgcaagactaccaaccaatagaaggacagcgatacttgatgtaataattttgtgatttaaagcccatgcaagtatgcgtttatacccatttgctaatttacttggtttttcttcatgatgtacttctttttccctcatactctctttcttaaataaagagtgagctagcatcggtacgattgtaacagctactagtaatgatgctaataaagcgaagacgatagttaaggcgaatggtaagaacatttcaccaatcataccttttactagtccaagtggtaaaaatacagcaattgttacgatggtagaagacataattgggataaacatttctttcgtagcttcacgaattaaatcttttccgcgcaatttctcttctgataacgacatacgtcggtaaatattttcaataacaacaattgagtcatcgacaacgcggcctatagcaacggtcattgctccaagtgtcataatgttaagtgtaatatccatttgctttatgactaaaacagcaattaataaagaaagtggtattgaaacgacagagattaacgttgttcgaatatttcgcaggaacagcataataataacgatcgcaaagatagcaccgaaaattgctttgcttagcattgtttcaactgatttttcaataggtgcaccttggtcgaatgttgaaataatctctaaatctttatattttttctcaagatcttttactttatcttttactgcatttacaacatcaactgtatttgcatcagaggccttcacaatttgaattccaattgcttcttttccatttgttcgagaaatggattctgctttcccaacttctttaatgtcagcaatttcttctaatgtaactgttggaatcccgttcatagcagctggattcatttgcggcgtttgtgcaccagcgccggcattttgactaccttgaccgttaggtgaggaaggtatagctgggattttaagttcttttaatgctttaatcgttgtaatattgccatctacaacaactgatttttccgtgtctttaaatgtatataagccaagtggtaaagatacatccgatcccttaatcacattttttacagtatcttcacttagtcctagttctttcattttatctttcttgaagacaagctgtacttcatctacttgttggccagcaatttggacagatgcaacaccatcaagtccttttaatcctggtacaacattcttttctacattttcagttaaggtagctaaagattcattcttgcttgctacgcttaacgaaataacaggaaaagcattgaagtttactcgtgaaactttagggtctttaacaccatctgggagcttcacattcgtaagagcttctttaatttctgtttctgctttttccatatttttatcaaaatcgtattctactcgaatagaagatgcgttttgaaaagatgatgagctcacaacgttaacaccgcttaaattttgtagttgttcttccatcggctttgaaactttatcagctacttcttctggtgtagcaccaggatagaccgtagttactgtcacaatcggtgttgtaatatcagggattgtttccagcttcatattgagtccagagtagatccccgcaatagtaacaataatggttagtagccaaactgcgaacttattttttaacgagaaattgatgattttgttcatgtttgcgctccctttttattatattgaccaactggtcagtctaatacataatataactgaccgttcggtcaaacgtcaataaaaagagatggtataatacatttataatcagatgcgagattaaatttaggagagaagatatgaaagaaaaagagcgtttaattatagaatcggccatgaagttatttgctactaagggtgtaaatgcgacatcagtgcaggaaattgtgacagctagtggtatatctaagggagctttttacttatattttaaatcaaaagatgagcttttattagcgacacttcgatattattatgacaaaatccaaaagaaaatgctggatattgaacaagagtctttattaccacgtgaaaaatttgcaaaacaattacactgtcagtttaatgatatacaaaaacataaagaatttattattatgcatgcaagggaaaatgcaattccgtttaataaagaagtggaagaatttatgatgcggatgaagttagagtctcatgcattttatcggaatagtttattgtccatttatggtgaaaagattatgccatatttattggatttagtaattatagtagaaggcatatgccgtggttatttagaattaattattttacaagcaccagaaattgatttatcgtatgtcgctgcttttattttaaaaagagtagatcatttagtaaatggtttggtagaatcttcagaagaacctattttacatgaagaaaagcttggagaattcctttgtaaatcagagctcattaaggaacaagttaaagagcattttttaaaagaaattattgtatttaagcgtaatttagcggatcaattagaggatgatgagttgttagtaacgttagatgttttagaggcggaaatgcgattgcttaatccaagaattccggtaattagaggtatgttagcaaatttagaggcgtatccggaattaaaagaatttcgattacgccttataggatactacaatataaaaaattcttaatagaaacaagtaaaaaactccttgtgtacacaaggagttttttcttaaagactatttactattttgagaccattcttcaacatcccaaacttttgtgatccaatcttcatagaagtccggttcgtgacatacaaggaggattgttcctttatatgctttcatagccttcttaagttccgcttttgctgtaacatcaagatggtttgtcggctcatcaaatagtagccagttactttcctcacccattagcttacataaacgaacttttgcttgttctccaccacttaattgacttaatgggcgagaaatatgttcattttttaatccgcattttgctaacatcgcacgaatttgatgctggtctaaaccagggaatgtattccatacatcatcaattggtgttatattatcagctttaacttcctgttcaaagtatgcaggctctaagaagtcaccaaggcttgttttaccgcttaaaggtttaattttacctaagattgtttttagtaacgttgatttaccaacaccgttacatccaacaatagcaattttttcaccacgttcaatcgtcattgatagctttggtagtagcggatgtgtatatccgatttctacattttcaccttcaaagacgaagcgactacttgcgcgactttctttaaatgagaattccggtttaattgctgtttccggacgatcaataagctccatgcgatcaagttgtttttgacgactctttgcacgacctgttgttgaataacgagccttgttctttgcaatgaagtcttcttgctttttgataaactcacgctgcttttcataagcgtttatatgttgatttttattgatttctgctagttctaggaatttttcatatgtcgctgtatagcgtgtcatttttgtgaattctagatggaaaataacatcaacacatttgttcataaattccgtatcatgagaaattaataagaatgcatgtgggtattcttttaaataatttgttaaccaatgaatatgttcaacgtctaaatagttagtaggttcatcaagcaataatacttctggctgttcaagtaatagctttgcaagcaatacctttgtacgttgtccaccacttagtgctgaaacatcacgatctaaaccaatagcatcaattccaagaccacgtgcagcctcttcaattttcatatctagtaaatagaaaccacctgcttcaagtgcatcttgtatttctgccatttgttcaagaagttcttctagttcttctggtgtagcagttcccattttttctgtaacttcatttaaagctttttccttttcgaataacggtaaaaatgcatccgctagtacgtcacggatcgtacgtccaggcgttaaaacagtatgctgatctaagtagccgtaatgtgtgcccggtgtccattctacacgaccttggtcatgaataagctgaccagtaatgatattcatgaatgttgatttaccaacaccgtttgcaccaactaatccaacgtgctcacctgctaataatcgcatagatacatctttaaataatgtacgatcaccaaatgtatgtcctaatttttcaactgttaataagctcatagtatcctccgtccaacttgaaatagtaccttgaatcatgatactaaattctttcatataatgccatcatttcaaaatgtatattttttcaaaagaagtgtttgtaaatgttagtatataaaaaagttacttctacctacagaagtaactttttggttatgccttttgtttaacttcactaactttcttttcagctacaataaaatgcggtctacgttttgtttcataataaatacgaccgatatattcaccaataacacctaggaatatgagttgaataccgccaataaatagtatagcggaaatgagagtaaagtaaccaggaacttccacaccaccaaggatgatttgaacgaacgtagtgattacgtataaaagtcctaaaatggttgttagtaatccgagatatatagatagacgtaacggtttattattaaatgaaattacaccatcaattccgtaatttaataatttcgagaaggtccatttactttctccatcagaacgtaatacattttcatattcaatgattaattcgttataaccgatccaagaaaataagccttttgaaaatcggttgtattcacttaaagataataaagaatctactgctcttcgacttaaaagtctaaagtcaccaataccgtctactaattcaatatctacaaatttattcatcactttatagtaaagacgagagacgaaagagcgaacgggtgaatcaccagttcttgttctttttgcaatgacttggtcgtagccgtcgttatatccttctaacagttcttttattaacgtaggagggtgttgtaagtcagcatccataataacaattgcatcgcctgtagcatattttaaaccagctaacattgcagcttcttttccgaagtttcgactaaatgatatgtagtgtactgacgaatctgaactagctaaatcacgtaaaatatttaaagtatcatctttactaccatcattaacaaaaacaaattcataatcggtagttaatttatgaatttcaagagaagtctctgaataaaaggctcgaagcaccttttcttcattgtagcatggtacaacgattgaaagagtcatttttgacactccttgtttgtagtgggttaaaacaatgttatgcgtttttatatgaatctatccaattggatagattcatgattcattgattgctcattattgctttttaaaagaaaattttcgtcgtgcttttggatttttgaaaattagtaaagctatacagataattagtgagatgattgatataatcatacctaatttgaagtaaggtgtaacgtaagtcatttcgattacatgtgaaccttttgtaatgggaacaccgataaaggcagaattcgctttcgtaaattctgtttcttttccatcaatttttatagtccagcctttactatatgggacagataaatataagagcccgtctttatttgatttgatatccccttttaaataattgttcttataataaatattttcaagcctattttcagttagtttttttgtttctttttgtacactttcatagtttacaatatttgcttgcaagtcacctaattcatactcacctgccatatcaatagagatagttaggttttctggacgctcattgcccaaattgtaaacaaacctttctaacggataagagtatgcaccagcatcgtccccttttcctatcgtttttccattaacagttgcattgaatgtgcctgcattttttaattttaattctatcagtagatcaccaggtgtatcaggataattgataggtacaatcatatttccaaagccatgaacaattagtttattttcttgtttttctatgttttcgaattttgctttttccgttttaatagatactgcctttgatttaaggtcttgtttattaaaatggtttaatgaaaattcttttgtattattaacgacaacagcatgtaataataattgatcacgctgagcgaagtttaatttagaaaattcttcctcacttatagccgaatcatatacatatcctaacggtaaagcatagtcatttttgtaaatattatacggtcctacttgctgtaatagtttatatccataaggcacattctttgaatctgtatcagcacttaatacgcgatattttacacctagcatattttcaagtagtagtcgactatcagcttgataaaacattgaaggtgtatcgtacatttggaatacaccatatttatttttcataaagtcatggacataataattaactaagctttgatacgtacttaagccatgataaccttgtagcattggtgtgttatattcgctatatggattaagaatacgataaaagtctttatcattttcttgtatgtagcgaattgcagcaatttcttctttattatcatagcctggttcgtgtaacttttcagttgaaatctggctctgtccgtaaacggtgctaagtatattattcgcatacatataattcatagaaattgtgctaacgagtacattcaatacaactaaaaattgtatgaaaggtttggaaatataacgccataaacatactgtaataacagaaagaacgacagttccgagtaaaatgttatcaacgtcttgtaaaggtttatcagttacatttatatttgcttttctataaaatgcataaatgaataatccaatagacactaataaacttattaaataaggtaatttgtagtctttcttatgaataatcatccaatctagaatgtatgcaattgtttgggcaattacaaatacaaataaatagaaccatctagattgcattgctgaaaaaccattaaacacagaatatgtatatggaagcataaacagaatgaacatgaataacgtaaagaatactttatttttaacgagtttatcacgtataaacattccaaatacgattaagaataaaattaaagctggtaaagctaattgatgattttcagcattatacatgaagaaaatattttccattaaatctttataaaatttatcttcaaataataatggtatctcaaacttttttgatagtcgatcagcactaaatacggcattaactgatgggaggaagcaaacggcggctaaaccgagtgataatccatacaataaaccgattctaatataataagttagaaaagagacaatcgttttattttgttgtgtcgcaaagtattggaataatgcataaataaatatgaaaatacttgtgataaaagcaaaataaaagtttgatgctaacattaaagtagcagcgattaggaaaagtccgcgcttcttttcaataatatatttatcaagtccccatattactaatggtaaaaatacaatggcatcagccatgaaatcccatagtaaagagtggcggatgaaagtaatacaaccaccatatataatagcagcaacaaaagatgagaatgctgttttattatggtaacgtaaagaaccatatatgaataccatagctaaaaagttttttaaaatactcatgtataatttcacgtcatatacttgctcaagacttagtttaggtagtaacagtgtaatccagaaaaacggtgatgtgctgtaataataactaaactctccaaataaatctccacctaatccataatcaaaagaccaaaaaaggttgccatctttaaaggcatgttgtagaagaaacgtaaaaaaaccaaattgacgtaacgcatcccctgtaccagaaaaggcttgattagatgttaaaaagaaataatgaaaagcaaaagcgcacaataataatattggcataattattattgttttcttggaaaagaatttattattcggctttatgctcataaaaattgataatcctcctttgaaagtcgttacatgtagcaactagtttttaggtagcatataaaaacacaccaatttttaaaggtgtgttctttagttttaacatgagaaaatatatatttttgttgaagcatatatatttttacaagcgttgaagttcatagtttacatgtaatttagtataaggcattttcagaaagtaagtcaatttgagctggaatatatagcatttttttactgaagaaaaatgatggtatataaaaaagcaaaaagcttttccatttttaaataggaaaagctttttgcttttaagcatgtttgcgaataagcttttgttttataaatcctaaaacgaatccacgtatttgaggatcaattacaattccgattataccgtatagtataccagtaagagttaaagcaactaatggtggtaagttgattaatgcaattcggtatataccgtaactaataataaaggctaaggaattaaatataattcctttaactaataattgcatgcctttacgaataaagagggtaaatccaattaatagtgtaatttcggtaatgatggctgcggcagctgcccccatcattccatatttactacctaatacaatataacctatgatggcaacaactaatccaatagtcattgttgttgcacgtttccattgctggccaatcgttgttaaattatcggctagtggatagttaattgattgtaaaataaccataaacgctagaatagcaagagcgtcaccagcgggagcgtatttttctcctaataaactaacaatccagaaacttggatcagcaataaaggggatagaaattcccattcctaaaaaagacataagttttaattcaaaacttgataattttctatgttcttcaatatttttctcattaccaaaagcaaaaagtcttggataaaaagcagctgcaattactccaggtatttgatatagtacagcaggtattttagatgcagcaccaaagaatccaacttgcttatatgttgaaaccttttctaatataatagggcccaattgtggtaagagcataataatgattccgttgatcgtgaaaataagtagttgatctaaaatgcctttatcccaacccttatggactttcgtgtaacgtattgtcattataaaggcgataacacctgttacaagactagataccccgtacatggcagcaaccatcataagtgaccattggaaagacatccctagtaatagggcagcagcagctgttacaccttgtagtacagaaataatagctgtaaattgcatgcgttctgttacttggaagtaagccataccaacaccttgtaaggttgctccgaacattgttggtaggacaacccaatataccatcgcacgtaagtaagcatcgggatagaagaactgggcaaaaatagcgaaaagtacagaaattacgatagctaatattaaacgaatacgtaaataactacttattagcacactaatattagcatcgcttctcgttccttcacgcataaacgtatgtgttaaacctgcatctgtaaagtaacaaataacagctgaaactgctaacgcagttgtaaacataccgtaatcacttggagaaacatatcttgcaaagaaaattgttgcaatagccagtacaaagcggacagtaatgtttcctacaaagaggtaggatgcgttttttagaattttatttgttttcatgagaaaagacctttctattctttaggacccggttagtttgtcctatttgtaaatttaatttgttcacagaaagagagagtatcgttatattttcagtttaagaaaacagaaatttaattcgtacaaaccaaagcattgcatatagttttttactacgctttccattctttgaatagattttacggcaatatttccttatatcttttttgattaattgaacttgtgatttatctaatcgagagttttctttaatatatatacaagcgttattgatgactgtataagggaataaataagtctcaagaatctcaatcagtgactgagggtctttcgtaatgaagtcttgagatttattatgtacccaatctttcatacgattgaatacttctagctcttttgttgtttttaattcataatctttatacttagaagaaagatttccttctgataagattctataataagttaagtattcatcgacataacatacatttgtcaaactcataagtttaaataaaaactctaaatcttctccccaactacatcctggtgtaaaacgaatgttatgatccattacgatggatcgtttgaaaatccaagtacttgtttgagcaacaacttgatgtgttaggaatgcttttgccatatcacctttaataaagtttgttgtatgttcaaccttctcgcctgtttcttcgtagaaattcatataaccacaatagcacgcgtccatgttgtttttatgcatactctcgatttgtttctcaattttagttggatgccataagtcgtcactatcaaggaaagcgatatattctccgctagcattttcgatacctgtattacgggctaccgaaacaccttggtttttttgatgaacgtattttacttgccctgggtatttttcagcaaggtttttcacaatagaaggtgattgatctttacttccatcatctacaattacaatttcaatgtttttatatgtttgatctagtattgactgcatcgtttcttcaatatatttttccgtgttatacaggggtatgacaacagaaacaagttgcttttgttccatcatagaatttttatctcctcaagttttttatgtcttgcatcatatatacaagccttttggaaggaagaagattacaagaacatctgtataagtttaacgcatataaactttgtaaatcaactttctattgttgtactttgtataaaaagtatttattatagaacgtattgtgttgtaaaaatatagaaatatattttgaaaattatgtatctgaagggagaagatgagatgttagggcgatttactcgcaaatctaatataatccttttagggattattatgatagtcggttttgcacttcgttttgcaactttacaaacacatggtgcagatctatctatagctagcgatgatataggttatcaaaaaacggcaaatattttattggaaacagggatgttaacatatcatgaaccagataaaccaacgattcatattatgccgggttttccagctttattagctgttgtattttatttttttggaaatggcagtgaaggtctttttgtagcaaaattaattattatcctattaggggtacttagtattttgctaacttataagattggtacttatttattgaattctgctgcaggattaataggtgctttcttattagctgtgtatcctccagagattgttatggaaaatttaactttaacagaaggaccgtttctattcctttcattaggattagtatattggagtttaaaattagctgatactcataaaacgaaacatcttctgattgtattaattttctactttttagcactgtacctccgtgtacaaattgccttatatccaatcttactatttgggtatcttttaatgaaacgctacccattccgtattatgatgaagcaagcgattataagcataggaataggacttatcgtacttggaccatggtgggctcgcaattacattcaatttgataaatttatcccactaactgctggggcagggaatccgttattacttggaacgtatcaagggaaaggttacccagaaggtaaggatatgggggaacttgaaatagagttacatgcaaaataccctaatcttgaagcacatgaatttatggaattagaagaaaaaatagcgattgataaaatgaaggaatggtggaaaactgataaggaatctatgatagagagttatttagttttgaagccagaaattctttggaaaaaaccgtattattctatagagcataatattgaagtattcaatgtttctgcaaaggatatgaatgaaatatataattttattaagacgacgtttttaatatgtacagtactttcatttattttccttttaaaaaggtggagagagactacatttttatggtcaatccttttattgcaaacagctttaacatgtttttatgttgcatatgaacgatatgcattaccgttaataccattcttatttattataattggagttgggaccgtggcaactgttatgaaaattagtaaattattaattagaaaaaaatagtttgcaataaaaaacatcttaatttttttaaaaaattaagatgtttttttgtatatgttcatatttaaatagaaaactattctttatcggtttcaggttgcgttacttttaatttttgttttaataacgcataatcttgcgttaacgttacaagttgatgatgtaatttagaaatttttcttgttaagtcaaaaattaatatgaaacagaataatagtccaaataagaataaaacagatggaggatattctacgtgtaatagttggccaatccaatttataattttttcagtagaacttaaaatagccattgcaacacaaacaaaaatccataaaatagcatatttagtttctaaagctccacgacgaatggaattaataattaataaaaataataatagaatgaagataaatgaaaaggtaattataggcatttattatcaacctttcacaattttttgcatcaatatagcaaggcttactttaatcatgtaatatgcagatttaagaggtgtgatagaagattgtcccccttgacgctcttgcatatttacggatatttcattaatgcgtaattttttcttttttaaatgaataaggacttctggttctggataatcttttggataattatgtgcaaaaatcttaattacttctctattgatagcacgatacccagaagttggatccataaaggtttgttttgttagtactttcagtagagcagtaaaataaaaaataccaattcttctagaaatactacctttataggctgttttctctgtaaaacgtgaacctagcaccatatcgcattggtcttcagcaataggttttataattttgtacaaatcatcaggattatgttgcccatcagcatcgaactgaatcgcaatatcatatccattctcataagcgtatttataaccagtttgtacagctgagccaatacctaggttatatggtaagttcacaaggtgaacaggaaaatcatttacgatttgagctgttttatcatgtgatccatcattaataacgcaaatgcttaattctgtaaaatgctgttttagttttaataatcttgttaatgtatctgcaattgcttcttcctcgttatacgcaggaataataattaacgtttttggtattgaaattggtacctcaatagacattatcgcaccatcccttatatacttaattatattatagttatttttaaacgaaccttatctaatataccattaatagtatagcaaaataaaggaaaaactggtggattattttaggagacaaacagtaaataaaagataagaggtggaattttttacaataaaaaatacatgcaaggatgaaataaacctgtgcatgtatgaagtgagagtatcgtattatatattccatggcttacttaaagttaaaacttcagccatctctttactttttaaacgtcccttttttcggttttccgcgcgttctaaaccggttgtgtgtaaccaatgttcttcttcagtttcaggaagtacttgtggtacggatgaaggttttccatcttttattgccacaaatgtaatgaagcaagtagcagcaattctacgctcgcctgctaataagttttctgcgattacttttacgaaaacttccattgaagatttccctgtataacatacaaatgcttcataacaaacagaatcagcttggtgaattggagttaaaaaatcaactgaatcaatagatgctgttacgcaatgtttacgactatgtcttgcagccgcaattgaagcaatactatcaatttctgctaataatttccctccaaaaagtgtttggtgattatttaaatcgttaggaaaaacacgtgttgtcttaattgctttagattctcgcatgaatttcttttccatatattcagcccctatagtctgttttcaatcagaataatatgtgtaagcagattactcatattagatatttaatgaagtaaagtgtattccaaaagaggattatttaaacttctgtatttgtattcatgtaactgaaagaaaatttattttatctaaaatgtagtgtaaaagaggattcgcttacattgcaagtaaaaagtaatgactatgtatttgtcatagaaattccctatcagccgtgtccccattcatgatagaatcgttttgttatgaatggaaatagaggtgcaatggacatatgaatcatatacaaacaaatttttcatctttcttcaataaaattacaatcggtgcgatgctcgcattttttgtttatagttgttgggcagcatttgagacaagtaagcaattttttggaggaagtacaacaagtgtaacaatcatattagcaattttcgtcatacttattttgttagtggcatcaattctacaatatcgttttacagataaacaatttcttatttttcttataagtatatctatagttgtgagggttagtatgctgttatttgtagatgctccaataattggtgatatgaaagtgatgtatgagtctgcaaagcagattgcaattggtaataatatagggactgtaactcatttgccttttattatatatgagtcggtaattattcgtatatttggtgattcattattcgctttacaactatttaatgtgctattttgcacaggaacagcattatttatttatcgtattgcgggaatggtttttggagaagaatgcggtcgtattgcttctatcttttatgctctgtatattccaaatatattcatgagttccgtattaactcctgaatcacttgcaatatttttattttattttgcttgttacatacttttatataaaggattagatcatccttatatgtgggtgttttcagcgattttatttgcatttagtaatatggttttcccaatgggattatttcttcctatttttattacggtatatgtattattaatcgaagtatttcaatcagcaacgaaacaaaaggtgttactaaaaatgatagggatacttattctattttatagtgcccattttagtgtgaattatggaattaaggcaatgggattgtcacaatatacgatttcaaatgagacgtatgttcaatctgttttaattggaaagacgcaacatgaagaaaaaatatcgaaaaatcaaagtgtaacagagcatattgatcaaaagttaaaagagattgagggagaaagatttaaacttttagagccgatgataaatcagttttcagatgaaggggtaaattctattcttttcaaatgtgaaaaactgatatatatagccgtaacattgtttatgactatagctctattacacttccttattaagaaacaacaaaatgagggatatatgttgttcttatttttaattagtggctacgtattgttaaagctctttcaagtagatatggcatattacaatgtaattatgccgtcattgttcattttgcagagctttggtgtttatatgagttatgtgtattgtcaaaaaatatttttcagaaaataaaaagaatccattctggattctttttttgatggaagatgaaatttagtagtcagtgcagatgaaaagtatgcctgacttgaatttgatcccgctattttccaggcagtaagacccccacctcaaaatcagcgaaagcaaagaagttaggtggggggcgggctgcccgtaaaagcccgattggtgagggctgataatcaacgggggatgaacaaaacctccgttgattaaagtttcactttatcttatcgatttagttctagttgtaaattatcggctgttagagccatttgtgaggaatcatcttgaattcctttcattacttgtgaaatagcttgtagctcgtgttcaattttcttattctgttcttttgagttagacatatcttttacaatttcttggaagtatcgatctgttgctgacatactatccgttccttccgatacgagagagctaatttgtttcacggaagacgagacacgggtaatttgttcatttgttttttcaacgagctttgtaacgttaaatatagattctttcgtttgctctgataattttcgaatttcaccagcaacaacagaaaaccccttcccaaattctccagcacgtgcagactcgatagctgcatttagtgcgagtaaattggtttgctccgcaatcgatttaacaatatctatgatttcattaattttgttagaaatattaaggagttcatgagtatctgtaataatcgtttccatattcatttgaatagatcccattcgtttgttttgctggtttaattgttctttccctttattggctttttcttcagatgttgtagctaatgatgtacctgttttagcaatctctacaatagtttcagatttggcggttagtttttgaatagaagagcttgttttttcagatacagcagctagttctgttgcgatatgcgtaattgtcatagcagttagttctttttctttctcatgctctttttgcattctttcatattcagattcataagctgcaagaacaagttcttgttcaagagtaaataatttatttataacatttatagaataggaaaaatcatcgattgttgttatttttgtttgcaaaatcttcatgatagagcggaacaattcttgataagcagcagtataccattttcgatgtaaaccaatttgtacatgccttttggcaatcctaacacgctgttcaataaaatcttcatgcatattgccgctgaataattctttaatatgtgtttttaaagtttgttttagttttggaatagagctgtaacgttcaataatagtaattaaattaggttgttttgtaatgttggcatagaatttttcagtaatccaatcaatttctgcataaataaaaggctgtagtacttttacaacttgtaaatcttcttttgaaatatgtagcatatccatttgaatttttaattcagaattagtagggacattaaaagttatttgttggtccttacttaattcgattatactggcatttgttttattaatattttttttgaaaaccccaagcatcattcttccccctgtatataaaacgttttcaattttaaaactaatatagagtaattatatatgcttatatataattactctatattagttcgttgaatagtatataaattaagagaattctatctagaattctcttaatggcctttattaattttagcatgtgttttaaagaaaacagggaaatgaacattatatattacagtgacgacacgaataatgaatgttactaataaacaaacatagaaagctaacacgtgcgcccccatagcgtgtgtgattaggaagctaattgctcctaagatagaagcgattgcgtaaatctcttttcggaatacgtaagggatatcttgagcacaaatgtcacgcaaaataccgcctccaatacctgtaatgactcccattgaaacaactagaaatgaggcgtcaacatgatgtgacattgccgcatttgcaccaatagctgtaaaaacacctaagccaacagcatcagaaagcataataacgacttgaagtttattgatgcgctcaaaaaacatgcaagtaaataatgctgataatacacttacgaaaaagtaaatgggttttacaaatgcgacagggggcaggttaccaatcatgatatcacgaataataccgccgccgagcgcagtagctacagctaaacaaaggacaccaaataaatctaaatctttttttaaaccaactaatgtaccagaaatggcagcggcgataatgccaagaaacgtaaatatatcgattaataacatggccttaatcccttcctcttaaagatgttccagagaaaaaatatacactaaagtattggaaataacaattacttttcgctacatgtagaaaaacggataaaattcataaagaaagcgtttgaaaatgtttggaaaatagccataaagtaatttgaaaaagatatgaaaagattaattttacattttttgatgttgtttatttggtaaaacattacaattataggtaggttatttatatttgtataaaatgataaaaaaatatttatatactgacaaaaataaggggatggttgttagatagattttataaaaataggggagtatagctaaaggacgataatttctattactgattaatacttgtcctggctagttttagctggaaaaatagttctcgatttgaatatgagttatgttataattgctaggtgtgtttgaatgataaaaaattatgattaaaagataatgttaagattttgtatggaggtcttggaatgttagcaaatcaagctagggttagatttgagcattttttgctcttttttattattttacagcctgttttagatttattaacgtctcttagcatcactttattaaagtcaaatgctaccgttggaattttagtaagattccttattatggctgttggtggtatttacattttaattcaggcaaaagagaaggaaaatagaaagtttttaatttatcttatattgttagccggagttttaggtataggatttattaataacaaactagttaaggatcctattgtacttagtgaagaggttaaattcgttgcgaaagcattatatatatatatcatgctgggatcatacattttagctttaaaatcattgaaaaagacagttaatattagtgataaggttcgaaatagtattgtatattctacattaatcattaacgcaattatggttatttctatttcaacatctactgactttggtagttatgaatggatgaaggttggttctcgaggttggttctatgcagggaatgaactaggttcaatcttagctattattttccctattgtagtactatattctatccaaaaaacaaagagctggaaacacattctatattggattccatcacttttaatgatttattcgctaattcaagttggtacaaaagtaggaatgggctcaattggtgctacgctagcggcagcaatcgggattattttactacaattattatttgatagaaaaaatccgaacaaaaaatcccttgcacttaatgcagtaattgctattgtcctattagctggtgtagtcggaacgtttaaacaaacgccattagcacaaaatatgggtattcacaataattatttatcagagcaaaatgtggcacagcaaggtcaaaaagaaaaagaaattaaagagaagctgaaaaaagagcaagaacttaaagcaaaagaagaaaatcatcataaagttgaaaagccagaagaaaaggcgaagatagaagaggaagttaagaaagagcttgagaaagagcaaaagaaagaaaatcaagaaaatcttattttcagtggacgtcaagtatatgaagaaagacataagcagttctttaaagaagcgccaatgtcacaaaagttattaggaatgggttatgcaggtaactttaaatacaatgaacaaaagcagccagatccaaaactaattgaaatggacttccatgattggttttatgatttcgggattattggctttgtattactaatgattccatttatttattacgggctaagaattctactagcatttgctacgagatttaaggacatatttaatataaaatatggaatgatttcagcaagcttattgttagcgttaggtattgcttatattgcaggacatattttaacagcaccaggagttgggatttactttgtagtggtgttagcttatctaatagtagacctagaaattgaatgataaaaataaaagctaacttttgttagcttttattttttagtacagtaaaataaaaatagatggaaacgtagcgaggatttaaaggaggaaaaaatatgaaaatattgcatatgaatgcaggagcagaagatgggggagggaaaacacatattatttcacttctcgatcagtttccaactggtgaagtagaattagcagtatttgaagatggaattgttgcgaaggaagcaagggagttagggataaaagtccatgtgttttcacaaaaatcgcgctatgatttatccattttaaagaatataagtgaatttattaataaagaaaaatttgatgtagttcatacacatggccctagggctaatttctatgtttctttaatgaaaaagagaataaaggcaaaatgggtaacgactattcatagtgatccatttcaagactttactaaacagggcttaaaaggttggatttttacgaaattaaatttgaaagccttaaaaaatatagacttatttttcgttgtaacaaatagattgaaaaaaagcctggcagcattaggtatttcaaatgaaaagatgcatgttatttataatggaattgaatacgataaggaaaaagcagaaggctataataaaaaagaaatgttcaatattgatgaagatgtatttacggcaatccaagtagcacgattacatcctgtcaaaggacatgaagttttattcgatgcgttacaacaaacaaaattagagaaaattaaagtattattagttggcgatggcccattagaagaaaatctaaagtcattagctactgaaaaagggattaacgataaagtagagtttttaggacatcgtcaagatgtaaaacaattatttgcgtcgtcacatgtaaatttattaacttcccatagtgaagggttcccactagttttattagaagcggcaaatcaacgcgtaccatcaattgtgactagggctggagaaattgaaccattaatcgtagatgaaacttacggatggattgtgccaacaggtgatggaaaggcattagcattagctttagaagaagcgtatgataagtggaaaactggagagttagcagcaatgggtaaacatatttatgagcatgctactatgaacttctcacttcaaaaactatatgaagatacaaaggaaacatataagcaattaatagcgaaaaacttgtaatgatagagaggatagttaactatggcagtacaaacagttgatattctaggcgttcctttttctacaatgacaatggatgaaacggtccaatatttaaaagaacaactagaagcggagcgaactcatacgtttcaggtagtaacagcaaaccctgaaattgttatgtgcgcaaaaaaggatgaaaagttctatcaaacattattgaatacagatttaattacacctgatggtattggggttgtaaaggcaagcgggatgcttggtacacctttaaaagaacgtgtagcaggttttgatttaatgtgtaatttacttgcgaagttatcagaagatagtaagccggtatctgttttcttattaggtgcaaagccgcatgttgtacaagctgcagcagatcatttaacaaagacatattcagctgtatccatcgccggtatacaagatggttattttaaacaagaagacgaagagaatattatttctcgcattcaagaagcaaaaccagatttattacttgttgcacttggtttcccgagacaagagaactttatacaaaacaataagcagcgtttagaaacgaaaatggctgttggagtaggtggaagtttagacgtatgggctggagaggtaaaacgtgcaccaaaatggattcaagcaattcatttagagtggttttatagattatgcagtaatccaacacgctggcgtcgtcagttagtattagcggaatttttaaaagaagtagtgcgttcgaaaaagtagcgaaatatcgctgctttttttatttgttcatttttaataaattgaaactttaatcagtgaggcatccccacagattattagctctcaccaatcgggatagacgttttactttttgggaatgatgaaggagaattttttacacaaaagtattttacttatacaattcacacatgtaaaatgatgtgtaaagacacctgtgtgaggaggacttctagtgggcaaggttaaagaaatttcgaagcgcaaactactaggtatagctgggcttggatggctatttgatgcaatggatgttggaatgctttcatttgtaatggtagccttgcaaaaggattggggattaagtacgcaagaaatgggctggataggcagtattaactcaatcggtatggcagtaggagcgcttatttttgggatactatcagataaaatagggcgaaaatcagtctttattattacattattattattttctatcggtagtggtttaactgcattaacaacaacacttgcgatgtttctcgttttacgctttttaattggtatggggcttggcggagagcttccggttgcctctacactagtatcagagagtgttgaagcgcatgaacgtgggaaaattgttgtgttattagaaagtttttgggcaggtggatggctaattgcagctcttatctcgtattttgttattcctaaatatggttgggaagttgcgatggtattgagtgcagttccagcattatatgctttatatttaagatggaatttaccggattccccaaggttccaaaaagttgaaaaaaggccatctgttattgaaaatataaaatcagtttggtctggggaatatcgtaaagcaacaattatgctatggattctatggttttgtgttgtcttttcctattatggaatgttcctttggttaccgagtgtaatggtgctaaaaggatttagtttaataaaaagtttccaatacgtacttattatgacattagctcaacttccaggatatttcaccgctgcttggtttattgaacgtctcggtcgtaaatttgttttggttacgtatttaattgggacagcttgcagtgcttatttgtttggggttgcggattcattaacagtattaatcgtggcaggtatgttactatccttctttaacttaggtgcttggggagcattatacgcctatacacctgagcagtatccaacggttattcgtggtacaggtgcaggaatggcagcagcatttggtcgtattggtggtattcttgggccactattagtgggatatttagttgcttcagaagcttcactatcattaatatttacgattttctgtggatcaattttaattggtgtattcgctgtaataatacttggacaggaaacgaagcaacgagaattagtataaagtgaaaatttgaacgtatccctgaccgtttattatcctacactactcggctctttataggcagttagtgcgggataaaaggggagaggaaaccgaagtggtttccttttttctgtttttttagataaataatggtatagtaagaaaaagggattatttcttataaaagcgaatgtatacaacaggacatatggacaaagaattaggtggttgaagaaatgaaaattttactgatcatggaagaggcagaagagagaagagagttagctgaaaatttcactgaaaatatgagaaatgtagaatgttttgaagcaaagacaggaacagaatctttatttatgatgaaaaaacatataccagactttgtttttttaagttccaaattactagatggtactggttttgaatatgcaagtttattacgagaaataaattgctatacaaaatttatttttgtaggtgaaaacatagaagaatctattacagcttttcgtttccaagcattttattatttattgcgaccatttcgtgaagaagatttacaatttcttttatataaaataggtaaagaacaaggtgagaaagcaaagagttatttgcgaaaactaccgatagaaagtcaagagggtatacgatatattctcccagaagatattgtatatgtaagtaaaaataaagaaaataaaactgtttcaatttacacaacgaataatcagtatatttcaacatatacacttcaggaattagaaaataagctaaatgcatatgattttttacgtgtacataaaagctatttaattaatatgtcatatgtaaaagaactgaaaccttattataatggcacgtataatttgtatttagataggtatgatgagcaaccgattccagtcagtcgtaattatgtaaaacgccttcgaaataacattgaattatagtaggtaatgagagtattttaacatgataaactgaaaatccttcatgatagggaggattcaagttaaatattcagaaaatttagtacaatctccactaagaaatagtattgggggaattgtatgtgaagacattgaaatcgatcttactttggggcattattacagcagtaggagcaggtgcttttggggtagtagctttatcacaaggtgaaaccattaatgctgtatggctcttagtagctgccgtatgtgtatatgcagttgcttatcgcttttatagtagatttatagcgagaaaggtttttaatttagatgataatcggcaaacaccagcccatacattaaacgatgggaaagactatgttccaacaaataagtgggtattgtttggacatcactttgcagcgattgctggggcgggacctttagtaggaccgattttagcagcacaaatgggatatttaccaggaaccatttggattattgttggggtagttgttgcgggggctgtccaagattttgtcattttatttgcttcgatgagacgtaatggtaaatcgttaggagaaatgattaaggatgagattggacctgttacaggactaattgcaatgataggtattttaggaattatgattattttattagcagtattagcgttagtcgtagtaaaggcactaatcggaagtccttggggaatgtttacgatagcagcaacgattcctatcgctattttaatgggagtttatatgcgctatattaggcctggtcgtgttggagaaggatcagtaattggtattatcctacttattttatctcttgttggaggacagtatgtagcagaaaatccaacacttgcaagtatgttcacatttagtggtgaaacaattgctattatgcttattgtatatggatttatcgcatcggcattaccagtttggatgcttttagcaccacgtgattatttaagtacatttttaaaagtcggaacaattgtagggttagcaatcggtatcttaattgtagcaccagatttacaaatgccagcagtttcgaaatttattgatggaactggtcctgtgttttctggaaacttattcccgttcttatttattactattgcttgtggtgcagtgtctggattccatgctctcgtttcatcaggtacgacgccgaagatgatcgagcaagagggacacgcacagccaatcggttatggagcaatgttaatggagtcgtttgtagcagcgatggcgatgattgcggcttgtgtattaacaccgggaacgtattttgcaattaatagccccgcagcacttatcggtacagatgtttcgcaggcagctcaagttatttcctcatggggatttgctattacaccaaatgaactaaaagatctcgctgtaaatgttggagagcaaacaattttatcacgtacaggtggtgcgccaacattagcgataggtatggcatatattttctcacaagtaataggtggaacggccatgatggcattttggtatcattttgcgattctctttgaagctctattcattttaacaacaattgatgccggaacgcgtgtcggccgatttatgattcaagatattttagggcatgtatataagccatttgggaaaacggattctacattagcgaatgtaatcgctacaacattatgtgtattagggtggggatatttcttataccaaggggtaatagatccgctcggtggaattaatacattatggccacttttcggtattgcaaatcaaatgctagcaggtattgcattattacttggaacgacaattttgttcaaaatgggaaaaaaggcgtacgtttgggtaacacttattccaactgtcgggttgctgattgtaacgatgacggcgggatatcaaaagctatttcatgaaaatcctaaaattggatttctatcgcatgcaaaggtatttcagggagcattagatgagggaaaagtgttagcgccagcaaaaaatgttgctcaaatgaagcaaattattttcaatgattatatcgatgcggcgctttgcggaatttttatgatagttgtaatcgctgtgttaatttcagcacttcgaatttggatccaagtattaagaaataagccaatgccgttaaaagaggcaccatatattcctagagatgaaagtgagtcgaggaactatgcttaaaaagttgtggcaagtatggggtgaaagaaaacgctttattagtttgctcgttggggtaccaagttatgaagtatatgtggagcatatgaaaaagcatcatcctgaagaagaggttgtatgtcaaaagcaattttttgctgaggcacaagaagcaagatttaatgcaaagggtggaaaaatatcacgctgttgttaatgaaaaagggcgagttttcgccctttttatttttttgctgtttcacgtggaacagcaaaaataaacaaaatatttgggaattaaaggtatttcgtatacaataaggtgaggaaggggatagatggaaaagtagggagattattttatgttaagggacttatttgtaaatacaacaattattctttcctttatttttattggaggtcagcttttaagggataagccgttaaaagaaggattctcttttgggcagaaatgtgtagtaggcatttttactgggatactaggtatagtattaatgtatttcagtgttcgtgttggtaccattctattggatttacgctacttagctgttattctagctgttattattggaggaccgatagcgagtaccataacaattggtatgattttagtaactaggctgttgtttatggattattcattagcttctcaagtggctttttatacaatcattgcgataggaatagggagtatctttatttcgcgcatgaagctttctttagggggaaagtgggtatggttacacacatatattttatctattctaatcccagcgttatatatatggttaattaaagagatccacatagtgggattatatttaatttctagtattattacaggttacataacattcataagtgcaaattatgttttacaatccaatgagttatttcaaaagatgaaacaatacgcaacgatagatgcattgacaggtttaggaaacgtaagacagtttgatttagagatgaatcgtcatattagtaataagaacatgaaaaatgattcgttttgtttactacttatagatattgaccactttaagtatgtaaatgatacgtacgggcatcctgcaggggacgaagtgctaaaacaagtaggatgtattttacgagaaacttcacaatttccagatttggcttttcgaaagggtggagaggagtttgcacttttgataccgaataagggattagcttacggaattcttacgggcgagcaaattcgtacagctgttgaaagtcactcatttcaattgttagatgaaacgaaaataaaaattacagtttcggtgggggtttcagaatatgaagaatcaccggagcaatttattcaagcggcagatgatgcgttatactactcgaaacgaaatggtagaaataaggtcagctctgtatcttaaagataagatgaccagaagacataaagcttataaaaaacactcacagaggcaatgtatgaactttgtgagtgttttttatttatatattagacaagttcttttgatacaacaaatttacgatatgcaccatggtgagttggacctacgtattcgttaattttgaatgagtaacgaatagcagctgtgatgaattctttagcagtttttactgcttctttcacaggttttccttttgcaagttctgctgtaattgcagcagaatatgtgcaacctgcgccgtgtgtatttgtcgtatcaattttttctgattctagaaggtcgaatgtttctccatcatataggacgtcgattgcagtttccgtaccaagtttgctaccgcctttaattaggacgtatttcgcacctaaagcatggatctttttcgctgcttctttcatgtcttcaagagaattaatctttacgccacttaattggtaagcttcaaataagtttggtgttacaactaatgcctttggaacaagaacgtcacgtaagcaatcattcgtttcaggatgtaatgcttcatcagcacctttacataccataacagggtcaactactacatttttgaaattgtgcttttcgattgtttctgcaaccatttcaataatttctactgatccaagcatacctgtttttaaagcgtctacgccaacaccttcaattgttgtttctaattgtggttttaatgtagaagctgggattggaaatacgttatgtgcccaaccgttatgtggatccatcgttacgattgttgtaagagatgtcattccgtatacgcccagttcttggaatgtttttaaatctgcttgtataccagcaccgccacttgtgtcagaaccagcgatagtaagtgctttatttaatgtcattatgaaagccccctcgagtgatataatgaaaactatgttctcaccattatatcaatgttacgaataagtacaaagtgaaaagtagatgatttattttaagagctatttaaaatcttgtatgcaggagactgagtatgtttcgagataatcgtacaaatgaattagttatattaaaggaaattgcagaaacattaaatacatcaaatgatacatatcatgtattgcaagctgtcctagagaaattactaagtgtaacaggtttaacgacaggatggatttttcttgcggatgaaaatgggaagtatacgaagttaattgattatcaattaccagaggcacttacatatgaaaataaacgcccgatgtgcgaaggtgaatgttggtgtttacgaggttttgtagatggaaaattagagagagccgttaatattattgaatgtaaaagaattaataatgcaattgaatataattggggggatacggagggcattcttcatcatgctacggttcctttaaaagctgggggagaaaaatttgggttgttaaatgttgcaagtccgggtaaaacacatttttcagaagaagaattagtattactccaatcggttgccttccaaattggtacggctttaaagcgaacaaaattatatggaaatgaaaagagaagagcacattattatgtgaaattagagcgtttcattcaagacttaaaaacgattcataagtttaatgtactacctgaaaaagtggtaaatcacgtaggtgaagtatttcaatggaatcaagtagcgctttttattagggaggaaaaagaattatctctgcgagcgtcttacgttcaggaagagttaaaagaggatataaaagaggcggccaagagggcgttagaacaagatgaaccagttctaataaaacatcaaataggacataatgtacatctaaatcgagctgttattgctacaccaatacatattcaaaaccatatatttggtgttttatgtgttagcctgaataatggagagtttgatgctaatacaatagacgtaattcaagcattatcgaaccatgtttcgttaataatagagaatttgaggttaaacgagcagcgccgtgaacttgtgcgaatggaagaaagaaatcggttagcaagagatttacatgattctgtttcgcaaaaattattttcattaaccttcatgacaaaaggcgccgaggcagttttaaaaggtaaaaatgaaaaggtagatcaatctttgcatgagatgcgtgaacttgcgcaaggagctttgaaagaaatgaggacattaatttggcagcttcgtccggcgggattagaaaaaggattattgccagctctaaagcagtacggtgaaaatttgggactgaaaattagggagcaagttacgggtgttcgtgatttacctcgtgtagtagaagaagctttgtggcgcataggccaagaagcactgaacaatgtaagtaagcatgcaggtataaaagaagcgacgatttattttacagtgaatgagaaaaatgtatcattagaaatagttgatcaaggaaagggatttgtggaaaagaatataaaagaaaagaaatcactaggtatgactacgatgcgtgaaagagtagaattagttggtggaacaattaaaattgtaagtagtaataaacgaacgagcgtaaaagtaaatgtaccattatgatgtgaaaatgagggaagtttgtgaaaataaaagtattgttagttgatgatcatacagtcgttttaaaaggattagcatttttcttaagtacacaggaagatttagagttagttggagaagcgaataatgggaaagaagcgttagtgaaagtaggagaaacaactcccgatgttatattaatggatttatacatgcctgaaatggatggtgttgaggcgacggcatatattaaaaaagagtatccaaatgtgaaagtaattgtattaactagcttttctgatcaggcgcatgtgttacctgcattaagggctggagcaagtgggtatattttaaaagatgtagaaccagatcagcttgttgaggctattcgaagcgcatataaaggtaatattcaattacatccggatatagcaaatgctcttctctctcaaacattacctgtagaagaaaaggaagaagaaccttctattcaagtggatgtgctaacagcgagagaaaatgaagtattgcagctattagcgaaagggatgagcaataaggaagttgcatctgttttagttattacagaaaagacggttaaggcgcatgtaagtagcattttgagtaagttgaatttatctgatcgtacgcaagcggcattatatgcagtgaaaaatggaattgtataagacgaaagtcgtaagaccaagttcgcctttggaaggtggactttttttatggaaaaatacgtctatgtgaggacgaaattgtcattatataaagataaaatatgtttgtaagcaacaaaacaacaattacaagggataccttttttgaaagcatataacaacataagagtgagtactaggaggaataaataatggcaacagttttattcgttaaagcaaataaccgtccagcggaacaagcagttagtgtaaaattatatgaggcatttttagcaaactataaagaagcacacccaaatgatacagtagtagaacttgatttatataaagaagaattaccatatgtaggcgtagatatgattaatggtacattcaaggtaggtaaaggatttgatttaacagaagaagaggcaaaagcagtagcagttgctgataagtatttaaatcaattcctagaagctgataaagttgttttcggcttcccattatggaacttaacgattccagcagtattgcacacatatattgattatttaaaccgtgctggtaaaacgttcaaatatacgccagagggtccagttggcctaatcggagataagaagattgcattattaaatgcaagaggcggcgtatattcagaaggtccagcagctgaggtagaaatggctgttaaatatgtagcaagtatgatgggcttcttcggcgcaacaaacatggaaacagtagttattgaagggcataaccaattcccagataaagcagaagaaatcattgctgcaggtcttgaagaagcagctaaagtagcaagtaaattttaattaaaagtataatcgtcactcgaaaaaacagcattaacatgtaagcgttaatgctgtttttttatatttttagttcatcagcaagtttttctaatgtatttcgatcttgtatataatatgttcggccttcttttcttaaataatttagttggcaaaactgatttaatacatataaaagatgacggtagctgacatttaaatattccgaggcctcggtatgcttttctatataacaattattttgctctgttaataaaataaaagcagctaatcgattttcaaaaggataactatagttttttgcgtgattttcagtgcgagtaattgtcttttctccaataaatttacataagtgctgtaaaaacgttgcatcttgtaataaaagttgctgacaatctttaagaggaagtgccaaacacacacaatcttctagtacttcaacggacttagtaatattttctactcctattaatcctaattccccgataaaagatggtgcttgaataaaattaattaatgaaaccttcccgtttttatgactcatatatatttttgctttcccagaaattaagtaatagagataagggagagcatttccttcgctacatatcatctctttcgtttgaaaagaatgcagctctacatatggcaagacatgaaatgaaaatagggtatggaattgatggattcgcatgtattgataaatttcttcctcatttttgctgattttcatattttcacccccatgtatagtatgagatatctcctattatctttacaagaatgaatgatacgatttatgtaaatttgtttttgtagaaaagagagtgtgatgaatttatgaaaaaatataaaacattgttatttgatgtagatgatacattactagatttccaaaaggctgaaaaagtggctttacgggtgctttttgaagagaagggaatccctttaacagacgagatagaggctcgttataaaaaaataaataaaggtctttgggatgcttttgaaaaaggagaactatcacgcaatgaagttgtaaatacaagattttctctgttgtttaaagagtatggagaagaagtagatggaatattattggaaaataattatcgtaactacttagaagaaggaaatcaactcatgcaaggtgcgtttgaatttataaatcaaattcaaggagagtatgaattgtatatagtgacaaatggtgtttctaagacgcaagataagcgtttgcgtaatgcaggtttacattcattatttaaagatgtttttgtttcggaagatacaggttttcaaaaaccgatgaaagagtattttgattatgtttttgaacggattcctaactttgcacctgaagcagggctgattattggggattcattaagcgctgatatgaaaggtggatatgtagcgggaattgatacttgttggtttaatccagaaaggaaattaaatgatagtgggattataccgacatatgaagtgcataattttgaggagttagaagcgttattaaagcagcatgtgtaataaaaaaataggcagtggagctttcatccccactgcctatttttattaatttttattttcgttatgttttgggagcggaaaggcattcccgatagcagctgcaccaagcatgggcaatagtaaattaagcgggaaaaacataagtaatagtaatgttatagctattggctttcgtaacgcatagcttgaaattgctgtcgttacgatggcaacagatgctactggatctataggaagaatagatgctacagcgtatccgatacttgacccggaaaatataattgggaagatatgtccacctcgccaccctgtgttcaaacaaacggcagtaatgcacaactttaaaatccctgaaagaagtagtatccaaaaagataaatggctccattcaacaactaattcttttaattgatgctcacctgaaaataatgtgtacggaagaaaagttcccgcaattcctaataaaataccaccgataattccgagtgtcagtttgtattccctaaaagggtgaattaacttctctaatgtgaattctaacttgaaataaaagaaaccaactatagcaccgatactagcaagtggaagaaatgcgatccattcattgaatgaaagtgcaccttccccgaaatcaacaataaaggatccacgattatcgagtttactcagtagtaaataaacagaaaaacctgcgaaagtagtagctaagtatacaatcgccttttttcctttagaaaaagcagcaatttgttccccctcattttcatttggtgctaaataaccgaataatggtgcgttaaaaatgacacttaaagtagctccaattccgatctcggttagctcattcatactctttaaggcaaatttaaagcgatcccctacccatgtgcacagtccgcctataattccaactagtgcggcttctggaccaagactagcaccgaaaattaaaacaataatcgctgttaaagtagcctgatggacaaagcgatattcgattcgaccagtttttttatattcagccatcacttcaggcataaggcgtgggtatgtaccgaaatgtttttgtgatagaccaacaaggaccccgccaattattgttacgcaaagggtgtaataagagggaaaagagagaacttcaggcaagtatccccaaataaagtggattccaatatttattgtgactaaaaataaccagactgtagctcctactatagatcctagaagaatgccatatagagcaagtatgtactgcatatcttttttatttgtcatgttatacctccgttatgtaaatcttagtaggtaaaaaagtgaaatatactagtgaaaaatggattgaatatatatagtatctttttgaggagatggcctattcaacatataggttaactttaggggaatttgaatttataggttaaattacttatttaattttatagactgatttgaggtttttaaaggtcttttttgaaatagactagaatatatttcttttgttgctttatatgaaactgttaacatttattttagaacattcagaaaaaccgtttgacattaggaaattattgctataaaatcaacggtaattgcatagtcttatcaagaaaaggtggagggacaggcccgatgaaaccttggcaacagccgtataacggaattgtgccaaatcctgcaggtagtaatcctgagagataagaaagagcctttagagcgtgttttcaaactgctcctttcttgttttcaggaaaggggcagttttttattttgtataaaagaaaggagaatgagagatgggagaatcatggggaaaaggaacaatttgtgtgcaaggtggctatacgccaaaaaatggtgaaccacgtgttttaccactttatcaaagtacaacatataaatacgatacttcagatgatttagcagccctatttaacttagaggcagaaggatatatttatacacgtattggaaaccctactctagccgcatttgagcagaagttatcagatttagaaggcggtgtaggagctgttgcaacggcttctgggcaagcagctattatgctcgcagttttaaatatttgtagtagtggggatcatttactttgttcttcaacggtttacgggggaacgtttaatttatttggagtgagtttgcgtaaactgggcattgatgttacgttctttaatccaaatttaacggcagatgaaattacggcgcttgctaatgacaagacgaaacttatctatgcagaatcgttaggaaatccagcgatgaatgttttaaattttaaagaattttcagctgctgctaaagaattagaggtaccttttatcgttgataatacattagcaactccttatttatgccaggcgtttgaacatggggcaaatattattgttcattctacgacgaagtatatcgatgggcatgcgagctccttaggcggtattgtaattgacggtggaaactttgattggacaaatggaaagtatcctgaacttgttgaaccagatccaagttatcacggtgtaagttacgttcaaaactttggtgcagcagcgtatattgtgaaagcacgtgttcagctattaagagattatggaaattgtatgagcccattcaatgcatatattagcaatattggcttagaaacattgcatttacgaatggaacgtcatagtgaaaatgctcttgcagttgctaagtggcttgctaatcatgaacgtattgaatgggtgaattatccgggcttagatagtaatgaaaattactcattggcacaacagtacttgaaaaaaggtgctagtggtgttttaactttcggtattaaaggcggattagaagcagcaaaagaatttatcgcaaatgtaaaactagcaactcttgtaacacacgtagctgatgcacgaacttgcgttatacatcctgctagtacgacgcatagacaattaaatgctgaagatcagcgtttagctggtgttacatctgatttaattcgtttatcagttggtatagaagatgtttctgatattattgcagatttggaagcagctctagttgggggcaaaacacatgccgatcataattgataaagatttaccggctcgcaaagtgttacaaaaagaaaatatttttgtaatgacgaaggagcgagcggaaacacaagatatacgcgctttgaaaattgctatattaaatttaatgccaacgaagcaagacacagaggcacaattacttcgcttaattggaaacacaccgttacaattagatgttcatttgcttcatatggaatcacatctatctcgtaatgtaacgcaagaacatttaacaagcttttataaaacgtttcgtgatattgaaaatgaaaagtttgatgggctcattattacaggagcgccagtggagacccttgcttttgaagaggtagattattgggaagagcttaaacatattatggagtattcaaaaacgaatgtaacatctacgctccatatttgctggggagcacaggctggcttgtactatcattatggtgttccaaagtatccccttaaggaaaaaatgttcggtgtatttgaacatgaagtttgcgagcaacatgtgaaattgttacaaggatttgatgaattgttttttgctccgcattctcgtcatacagaagtacgagagaatgatattagaggagtgaaagacttaacattgttagcaaactctgaagaagcaggtgttcaccttgttattgggccagaaggaaagcaagtgtttgcccttggacatagcgaatatagttgtgagacgttaaaacaagaatacgaacgagatcgtgacaagggattaaatattgatgtgccaaaaaactattttaaacataataatccagatgaaaagccgcttgttaggtggaggagtcatggtaatttattgttttctaattggttgaattattacgtgtatcaagaaaccccttatatattgtaaagaaggattgtgtaacacgtggcaacgttttccttgtaaagattaacctttatttttccgaatgttcaaaatacattgtttttcagattttttactcatataatttcatctaaacacaatttttgaggggtggacagtactatgaaagaaattcaagttgggttattaggtcttgggacagttggcagtggtgtggttcgtattattacggatcatcaagaacgactcatacaccaagtaggttgtccagtgaaggtaacgaaagtattagtgcaaaacattgagaaagagagagaggtagaggtaccttctactctattaacacaagatgcaaatgaaattttagataatccaaatattgatgttgtcattgaagtgatgggtggcattgatgatgcaaaatcatatattttacaagctttaaaaagcggaaagcatgttgtaactgcaaataaagacttaatggcattacatggagctgaattattagcgacagcaaaagataataaggctgatttattctatgaggcgagtgtggcagggggaattccaattttacgcagtatcgtagaaggactttcctcagatcttattacgaaagtaatgggaattgtaaatggaacgacaaattttattttgacgaaaatgtcagacgaagggagagcatataacgacgtgttaaaagaagcccaacaacttggatttgcagaagcagatccaacatcagatgtagaaggtttagatgcagcaagaaaaatgacgattttagctactctcggtttctctacaaatgtagagcttggagacgtgaaagtaaaagggattacctctattacagaggaagatattgaatatagtaagagcttaggttatacaattaaattaatcggtcttgcaaaacgagatggtgaaaaattggaggttacagttgaaccaactttacttccaaatacacatcctcttgcggcagtacaaaatgaatataacgctgtgtatgtgtacggtgaagcagttggggaaacgatgttttatggaccaggcgcaggaagtttaccaacagcgacagctgttgtttcggatttagttgctgtaatgcaaaatattagattaggggtaacaggaaatagtgctgtagtcccacaatatcaaaaagtattaaaagagccagacgaaattgtcgtgaaaaagtttttaagactgcatgtaaaagacgaaattggtgtatttgcaaaaattacttcattgttctctgagcgcggagttagctttgagaaaattattcaaatgccgcttgaagagaaaggaaaggctgaaattgtaattgtaacgcatcgtgcgtctcttgctgattatgattatattctacatacgttgcaagggtatgaagaaatagattgtttgaaagcgaactatcgaattgaaggggatgctaagtagtatctcttaccataaaacagaaagagcctattaagcagcttgcttaataggctcttttttatttaaaatctgcgtaccaacttgaataaatgcttggataatccagcctgttgtaaaggataagatgattgttccaaaatagataggtccatctaataaaaagcttaacgttaaaaataaaaaggctaatgaaatttctgttcttctaaacgtccattttttcttctcagcaaccgtcaaaacgaaagcttcttgaggcgccgcgcaaaggtttgtagagacgtaaagaccaatcccagctccaacgaatagatttccacaaataagtgttatatattttggaagagagcggatagcatccataatagttgtaatggaaccaatccaatcaacaaaaagcgaaataagaaccatcgttacaatggtaccgatcgtaatttgttttttattccaaaagagtacgataagagtaaaagcaaaattaatcatgaaaatccaaaaaccgatacttatcccgaaattttgatatagtgcaataaagaaggaatcataagggctaagtccaaaggaagtaattgtcgtcatcatattaataccgatggcgagagtgagtagaccgccaatgaaaaatatatattctaatttgaatcgaagcatagttgtatatcctttcaaaatgtatttgctaggaaaggatatattgtggaaagcttaccaggtcaagggataatttttgtgagaaggggaaaatgagatgacaaatataagaaagattgctgaacttgctggagtatctgtttcaactgtttcacgtgtactaaataatcatccgtacgtaaatgaacagaaacgaaaagaaattttagcaattatagaagaattaaattatacgcaaaatgtgaatgcaattcatttagtgaaaggaaaaacgaatgtcattggcgttttattaccgcacgtaaatgatcaatattatagcgccattatcgagggaatatcaaaggaaacagcaaaaaacaattataatatgatgctttgtcagacgaattatagtgaggaaagagaattagaaattttgaatatgttaaaaatgaaaaagcttgatggggttattatatgttccagggcaaatagtaaggaaaagcttgaagaatatacgaaatttggtccgattgttatgtgtgaagaaatagactcgaatttcatttcgagtgtgcatattgattactataaagtgttttcgcgcgggatgaagagcttaatagatgccggccatacaagtattgggtattgcattggaagaagcaatagcattaatagccagagaagaaaacaagcatatgaggatgcgcttcaaacgattgctgtaacaccgatagaggactggaagtttaaaggctgttttacggtggaggatgggcgtaatgtaattagggaatgggcccatatgtcagtaaaaccaacagcgtttcttgtatcttgcaaccatattgcagcgggaatggtaacggaagcgaaaaaacaagggattcgtattccagaagatattacgattatcggttgtgatgatcaagatgtggcagatattttaggcattacgacgatttcgtattgtagtaaaaatgttggtgtgaaggcattcgaattattatatgaaaagattaatgatgagaaaatagatgtaaagcacgtagagttattgccagaattagtacatagggaaacaacataatagataaggtgtgaaaatcgcttttcaaaattgcgtttggtataattatggacaatctatgagggctaaaaggggttttgatatgagatcaaaagtagtaaaagtaattctactcattacaattgcatctttctgtttatttgcatatggctttgtttcaggtgtaaatgatgtattaaatccgaaagcttcaaatttaattaaaaagaccgatgtagtggcaaaagagaaaaagaaaacgggaacgttacaaatcgttagtttaggtgattcattaacgcgtggcgttggtgataaagaaggaattggctatgttgggcgaatgaaagaggatttacaaaaagattataagcaaaaaattgcattaacaaatttagcagttagtggtgcaaaaatgcccgatttattaaaacaaattgaaagtaatggcgctcaatattcaattaagcaagcagatgtaatcgtgttaacgattggtgggaatgatttgttcccaggctgggaatcgcttgggaaaatagatttagagacgtatcgtcctgacacagaaacgtttcaaaatgaagcaaagaaaattatagaagaaattcgtaaattaaatacagatagtccgattttttggcttggtttatacaatccttttgaagatgtagaagatttaaaagggtcttcaaacattgttgtggactggaatgcatctttagagaagttagcgctaaacgataaaaatgtatatattacaccgacatttgatttattccaaaaccgcgggaaagatttattatactctgatcattttcatccgaacgaagtaggttatacgtatatggcagaacgtttagttcaaaatgttgtaagtaaattaaaattagaacaaggaggggtaaaatgacgacgatactttccgtacgagacttgaagaaggtaattggaaagaagactcttgtagagaatatttcctttgatgtaaagcaaggagaagtgttcgggttcttaggaccaaatggtgctggaaagacgactaccattcgaatgttagtcggattgattaaggcgacagaaggtacgatttctattggtggttattcgattaaggaaaatttcagagaagcgatgcgtcaaattgggagtatcgttgaaaacccagagttgtatacatatttaacgggatgggaaaatttaaagcaatttgctcgtatgttaggtgatatatcagatgaacgtattattgaaattgctgaaatggttcatttagatgaaagaattcatgacaaggtaaaaacgtactcacttggtatgaaacaacgccttggaattgcgcaggcgctccttgggaatccgaaattgctcatattagatgagccaacgaatggtttagatccagcagggattagagaacttagggaatttatacataagcttgtaaaagaagaaaatatgagcgtgtttatttcaagtcacttgctaagtgaagtgcaaatgatatgcgatcgcgttgctattattcataaaggaaaaatgataacagttgccaaggttgaagaattaattaaaacagcaagtgatcgtgtagaatggattgttacaccaatttctaaggcgaaagatatgctagaagcggccaaagaagtaagggaagtgagtgtagaaggcgatcgattactatgccgcatggatattgcatctataagtagttggaataaacactttgtcgaaaatgaaatagatgtacatagcgttaaggagcttgtatttacgctagaagatttatttattgaactcacaaggggtgagcagcatgcgtgaatttgcgaatctagttttaaatgaatcagaaaagatttaccgcaagaaacgtatttttgttgtcatgcttattttagcaatcttgatcccgctttttgtgtatgcgcagtatcgtgaaatagaaacgacacaaaaaagactcggtacaactgattggaaggtttcattgcaacagcaaattgttgattctcagaaccggttgaacaattctaggttgccagaagaatggcgtgattggttaaaggtaagagttgagcaacaacaatattatttagatcatgatattaatccgatggcaccgggtgcaccgacttttgtcagagcatttattgaacaaggaattacattatttattccgcttcttgtaatgattgtagccattgatatcgtttcaggagaacgaagtgatgggacgatgaagatgttacttacgcgaccaattcggcgttggaaaatactccttagtaaatacgtgacgatgttatttttcatttcgctcatactgtttcttgtaggtttgtttgcttacatattatcagggcttgtatttggatactcgggatggaatttacctgttttaacaggatttgttattgataaggaaacgctaaatacgaactttgtgcatcttattccgcagtggcaatacatcttaatggcgtatggactagcatggtttgttgctatcgttgtcggaactatatcatttatggtctctgttttaattcgtaatacaccagctggtatgggcgttatgctagctgcattaattgcaggcggtattttaagctcgttcgcaacatcttgggaaggcgccaaatatatttttagtgtgaatttatcattaacggattatttatcaggaaaattacctgcattacaaggtttatcgatgggattttctttgatgaatttaactgtttgggcagttgtttctcttgttatttcgttcgtagtatttacaagacaggatatggtgaattaattagacaggaagtgacagtatggaaaatgttttaaagaatgattgggagccactattggcaccagaattcgagaaagagtattatcttactctatccagttttttgacagaagaatacagcacgcatgttgtttatccgaaggtagaagatatttttaacgctcttcagtatacaagttatgaaaatacaaaggttgttattttaggacaagatccatatcatggaccgaatcaagcgcatggtttaagcttttctgtgcaacctggtgttaaaacaccaccgtcattgttaaatatgtataaagaacttcgagatgaatatggttatgaaatcccgaataacggttatttagtaaaatgggcggaacaaggagtattattactaaataccgtattaacagttcgtcaaggcgaagcaaattctcataagggaaaaggatgggagcactttacagatcgtgtaattgaactgttgaatgaacgtgaaaagccagttattttcatattgtgggggcgccatgcgcaggcgaagaagaagttaattacgaatccgaatcatcatattatcgaatctgtacatccaagcccattatcggcaagacgtggtttctttggtagtaagccatattctaaagtaaatacgattttagctaatatgggcgaaagagaaattgattgggaaattccaaatttataaatagaaaaggtagttaacagtcgttaactacctttttattattattgttgctcgttctttaattttgcatctagtacaaaagtgccaaatgggataactgatgaaacaaatgctccaagtgcccataaaattgatttacggtgtacgattgttacttgaattactgcaaagatgaatagaataaatagaacaccatgagccatgcctgtaattttaacagctgttgcaaatcctgcgaaatatttcaatggcattgctacaaataatagtaataggaaagaaataccctcaactagtccaattgctcttaatcgtccgattggtgtagataacataaagtagcctcctttaacgtatgcttgtatatagtaaatttgtattctttttcaaaataaaatagtctattttgtttcattatatacaaaaagaaagtttacactacgagaatagtgcaaagttcaaaatatagtcacaaaagcatgagaatttaaataaaaacctatttgaagtatttgacttcaaataggttttgtgaatgaaaatattaaacaagtacatccgtttttaaaacgaatttctctacaacttttgcaacaccatcgttcatatttgtatctgttacgtagtttgcaatttctttaatatcatcaggtgcattgcccattgcaacgccaagaccagcaaattcaatcatcgcttggtcgttatagctatcgcccattgcgataacttcttcacgcttaatgccaagcttttggatcagtttgtttaagctcgttccttttgtaacaccagcttcagtaaattctaagaagaatggtttcgaacgcatcacgcttaattggccttctagctgtttttgtagtttcttttcaacttcaacaaggcgttcagcttctttattcattaatacttttactacgggctctttaactgcagctttaaagtcatctactacaacaattggcataccagtaatatcgccctcaatttcagtataaggattattttcttccgttacgatatcatcgcccatataagtatgaatccatacatcttcagtttgactaatttcaaataggttgtgaacgatttcaggagatagtgtactactaaagatttcttcgtttgttttacagttaataatttttgcaccattaaaagataaaatgaaactgccgtattcttctaaacgaagttctttcgctacattgcgcataccgaacgttggacgtccagaagcaagtacaacctttacgccttgctcttgtgcagtcattaacgcttctttcgtacgaggtgaaatagtatggtcatcacgtaataaagtatcatctaaatctaaaacaatcattttataagtcatatagaaaattcctttctttaattgaaatcaaaatacatgttcatgaagagattgaggaataatagtaagacatcaaacctctttgaaaagaagtagataaattattatgagtgtgttgctcataatattggttaataatcattggggatgaataaaaccccaatgattaaagtttgattttatcgtaacaactctaaaggtagagtgcaataatggaagttttccaatttaagatatttgttttgctgtggaacgagaaaatagtatttctagcaagattgccattacagatccaagaacgagaccattacttaaaaacgatgctagaaatggtggaagtgtggaatatgctcctgctggaacaaacataactccgactcctgtaaagattgaaagaccggctactttaaataatcgttctttatcctggacagtttcgtattctcgaaaggcgaggccaatcatgcttgcgaatacaggataaatagcggcataaccaactgcaacagggattgctgcaaagaatgaagtaatctttggaaatatactaacgacaataataaagcttgatcctaatataaacgggagacgtttataaatattagtcgttgcaataaaacctgctgatccagaaatagcgacaggcccaatagctgaaaataggccgcctagcaattggttgattcctgttataatgccagcttgtttaaaacgatctgatgcagcgttttcttcatatttagagacaaccttttgtacaacgcgaatacttgctaacatatttgttagaagtaagagcgtaacgaaaatgaccgtaattaccatgttccattcaacacgaggcattccgaaaacaaataaggatggaaaacggattatgtctgtcactggtgttattggattagataatccgaagcatgcgaataatatccagccgcatacgatactgaaaagaacggaatattgtccaataataggtagcttcatgatgaaaaaggatagtaaaataacaatgagtgaaagaataaatacgttaggttgtacttctgtatgttttccatcaaggccaaacattccctttaagaaggagccactaagctgcgcgacaagaagaaataaatacgttccaatgactgtcggtgtaaaatagcgaacgagtttatcaataagtccaaaaacgctaagaataatacaaataataccacttaataagaaagcatattgaagaactttaagtgtctcattatttgatccaaatagtacgacacctaaacttgcgtaaagggagaaaattccccaccaaaggccagcaggaccttcttgaataggaagtttatgcccaaatatagcttgcaagagaccagcaaaacctagaacaaataatgttctttgtacaaatgcgatggcttcagcgccattaagaccataactagttgcgacactaattggtacaataaggcttccagctaaaataaatagtgcccattgtaaggcggaaagaaatgtcttcattatatcaacctctttcatagattccgtatctagtatatacgtattttatttccactggcaaagattgtaggtagagaaaagagttgaaacacagtatgaatgcacgtaagcaattatggatagcagttatatgtatgacttttgttgtaattctaggaacgataggatttatgacgattgaagagattagtttgtttcaagcattttggatgacaatgattactgtattgactgttggatacggagatgccgttcctgtaacgcaagcggggaaagtatttgcgcttcttattattcctgttggcgtaggtattgttacgtatgcaattggggtagtggcagctatgattattgaagggaatttatttcatgcagtacggaggaagaagatggataaacaaatagcgcagttgaaaaatcatattatagtatgtggttgcggtagagtggggcttcaagttgtacatgaattgcaagaaaagaatattccatttgtcgttgttgataaagatgaaagtatattggagcaggaaaagcttttatttgtacatggagatgcaacggaagatcaagtattacataatgccggaattttaaaagcagctggtttagttgctattgttgcaaatgatgccgaaaatgtatttattacattaacagcaagagggttaaacgatacgattaaaattgtggcgagatctgaaaagccagaaactgaagagaaattaaggcgtgctggtgcaaataaggttattaacccatctagtatggcgggtattcatatcgcaaaaggtattgcaaatccattaaccgttcattatattgatacagtgttgtatggagtagaacagtcatttgtcattgaagaaattctagttggaaaagattcaatattagttggtaaatcgttactagagagtaatgtaaggaatcagtttgatgtaacaatattagcgatttcaagaaatggtaatattatacataatccggcaggacaggaaaaattgaaagaacgtgatatgataatagtatttggttcagtagaaaaattggtacaattcgagaaagaattacaaagtacgaggtgataaggaatgcaaatatctagcgacaagattttaaataaaatggcgaatgaaattgcgaaggcaaaaagtagtgaaggacaaaagtcaaaagaacatttattagttgtgcgtgctttatgtgacttattattagatgaacaagttgaaacatctacatatagagaaccgaaaattcaatcgcaagtaattggatcacaaccagtaacaactatgcaaccaattgcacctgtttctggggagccagtatatataaaagaaagtgatgcaaacggtaattctttatttgatttttagaagataaatcgtttggcttatatgcaaaaattgcttatgataaaggtaaaaaaggggaattaagatgaaaattttctttttactaggttgtattgcagcggggctatctgttgcgttaggggcctttggagcacacggtttagaaaataaaatttctgcaaaaatgttagaagtttggaaaacaggcgttacatatcaaatgtttcatgcaggtggactattcgtagttgctttattgatggataaggttcaatcatcacttttaactactgctggttggctaatggtagctggaattattatgttctcaggtagtttgtatgcattaagtacgacaggcattaagttctttggtccaattacacctcttggtggtgtagcgtttattgtggcgtggattctagtagggactgcagttgtaaaaggattataaaaaacaaaagctggcatttgccagcttttttatggtcttggagcataagttgcttgttgacccggtaaatacgtaattctttctggaaattctacataatctaagtaaatcattagtaataagtaacgctttccggattcaggctcactaatgataatatgatcacgaccagctgcctcgataatacctgtataagattgagtaccaagagaactaccacgctcataagtcattacaactgtagcttgcttacctttgtttagacgaaggatattttcaatatatgattgttctagaggtaacatcccttgagaaattgcatattgcgcttgcgcagcttgttgctgcattgcttgttgttgctgttgctgttgcccagcggtcatttgttgcggttgtacataagttccagatggttgataaaaacctgttccataataggggttttgttgctgtgtcattcaaaaatccctcctcatttttattccttaatatacgctagggcagtctccagcagatggctggaagaagcagtgctttttaaagcgaccagagttttgttggttataccaagttggtggacatgccccttcaggtctaaagaaccataaggcaaagttggcaggccaaaaacgttgcccttgaatggtccgtctcgctagggcaatatcttgttcacgtgcccgttgataaaagtatcctttttgcgttgcttcaaaaccgccggggttttgataaaccatttgacgtaaattacgaatgcttttaaaatctaaacaatttccgcggacacgatttaccccaacgtttccgaccattaacattccttgttgcccttctccttcggcttcagcacgcatcagtctagccaacaactttacatcttcttcgttataagcaataacacccattatgtgtcacctctctttttggaataccttttggaaagaggtttatctctagatgaagtgtgtaacaattactagttcatacgtatgaggaaaagggctcagatatgacaaccaaacgaagttttacattgagagtggaaaataaaaaaagctagcgtgagccagcttttttattaaaaaactttagaccataagtttgagaagaaatcaccaatagagcgcattgttaacacaaaccaatttgctttttcaacttcctctgtcgtttttgcagtaactttcatacttttactaccgtctaagaaaccatatttatcagttgattctaaagtaattgagcctactttggcatctttcttaataggagcaactaaatgtccatcttcagcaagagatttatctaattcagtcccaattttataaggttctttgctaccttttttcgcaattactgttatttctttttcgggtgcaacagttacttggtcttctttcccttttactacagagattgtattgttcttattaacttttagtttttgtttttcaaagttattaaatccatattcgattaattcacgagattctgtgaaacgttcatccattgattttgttttaataataaccgagataagacgtacatcaccacgtttagcagtaatagtaaatccgtatccagctgtatcagaacttccggtttttaaaccatcggtaccttcataagcgaaagaagctcctggtaacatccaattccagttttccatacgaattggttttgggtgattgtctgggaagtttctaaatctttgttttgtatcctctagcatttctggatactttgtaatcattgcttttgaaagcatacccatatcacgagctgacatagagttttctgcatttggatcagtaccctcaggatgttttccttttaagtcagcgttatttaagccagtagcgtttacaaatttatatttctttaatcctagctttttagcatgttcatttgcaagatttaagaagtttttctcacttcctgcaagaagttctgctaaagcgatactagatccatttgctgagaatataacaatagaatgatataattcttttacagtatattgacgtcctttttcgaacggtacattagagaattcattattacgagagacttcataagcgtaatcagaaatatttactttcgtatcccatgtgatttttccttctttaattgcttctaaaacagcgtaaacaacaattaatttcgacatactagcaatagccagcaattcatctggattttgctcgtgaagtatttttccagtatctgcatcaaataaaagtgcagcggctgcctcaatatgtattttttcttccgcatgggatgttgttactcctaaggaagaaattgacaatacaagcaatagtaaaatagacaaaatttttttcatatagattatcaccttcgcatcgttatttagcatatagctcgtatcattttagcatatctttatatataaaaaggttacaattttacaataaatttgaaaaaatgtcggtttttcttcaaaagtgcagaaaaaaggagatttttgaggataaatatagagaagaataaaaaaaggaacgaatttcgttccttttcaccatttatatgtgtaaaaatttctctactttttcgtctggtaaaatgtttccaacgaagaatgttccaaattcaccataacgagcacttacttcatcgaagcgcatttcatatataagttttttaaattgaagaacatcgtcagcgaataatgttacgccccattcgaaatcgtcgaatccaacagatcctgaaatcacttggcgtactttacctgcgtattgacggccaattttactatgactgtacatcatttttttacgctcttccataggaagcatgtaccagttgtcatcaccttggcgacgcttatccattggatagaagcaaatatgatttgctttcggcaattcaggatataagcgagctaaaatttgcgggttttggtatggatcctcatcagctggaagatagttgcttaattcaacaacagatacgtaagaatatgcaggaaccatatattcagctaaagttgttttattcaattctgtctcaatttcatttaactcttccattgttggacgtaaaatcataagcataatatcagctttttggccaacaactgtatacattgcgtgactaccttttttcgcagtagctacttcgttccatttttcaacgacatttaaaaattcagacactgcttgtccgcgttcgtcgctagataatgttttccatgcagcccaatcaatagaacgtaaatcatgtaaacaataccagccatctaacgttgttgttgcttcactcattctattcacctcagttaatgatagttttacacgttaactatagcatatatagttttaaaatcatctatataaaaccttggcgcataaaattgtcacatttaagtgtttaagcaaggtgaatttaacggctgaattttatgaaaatataatcatttttattttatctattttttgggagctataagtttaaaatatagaagaaaagcagtattcttaaagatagagtttttttaacatatgtaggagggtttattcgtgagcaacttatttacaacagtaaaagaaaaagttcaaggaaaaggcatttctatcgtacttcctgaaggaactgatgaaagaattttaggcgctgcagagcgtttagcaaaagaagagttagtaaaaccaatcttagttggtaatagagaagaaattagcgcaaaagctgctagcatgaatttaacattagcaggcgttgatatttacgacccagctacatacgaagaaatggatgcgatggtagcatctttcgttgaacgccgtaaaggtaaagcaactgaagaagacgctcgcaaaatccttaaagacgaaaactacttcggtacaatgcttgtatacatgggcaaagcacacggtctagtaagtggtgcagctcactctacagctgatacagttcgtccagcacttcaaattattaaaacaaaaccaggtgttacaaaaacttctggcgtattcatcatggtacgtgaagaagagaaatatgtattcgctgattgcgcaattaacattgcaccaaacagccaagatttagctgaaatcggtatcgaaagtgcgaaaactgctgagttattcggcattgatccacgcgttgctatgttaagcttctctacaaaaggttctgcgaaatctccagaaacagaaaaagttgtagaagcaactcgcattgcaaaagaaatggctcctgagttaactttagatggagaattccaattcgatgctgcattcgtaccatctgtagctgagaaaaaagctccaggttctacaattaaaggtgatgctaacgtattcgtattcccaagcttagaagctggtaatatcggctacaaaatcgctcaacgtttaggtaacttcgaagcagtaggaccaatcttgcaaggcttaaacatgcctgtaaatgacctatctcgtggatgtaacgaagaagaagtgtacaagttagcattaattacagcagctcaagcactttaattctataatgaattgaaataaagaccgtcgctattatagcgacggtctttatttttctaaaccaagtgctttattattacgatcaataatacgttgtaaattcatctcatataaaggaatctcatctattgttaattgagatggtgttaactttggagcgaattgctgcaatgtttttaaaagacgcatcattaaatcttgtactgtaatggtttcaccaagtaattctgagagtgaggccatcgtacttggtacaatttcagggtacgtaaagcgtgtttcttccccttgaattgctaggttgtagaaatcacgaacgagtgcggcacgctcagagccacttccggtagcgcagagatagatttggacagcgacacctccgcgaatacgacgttgtgaaataccagcaaatttttgatcgcgaatacttaagtcataactaccaggacagtaagagccgacaatttcttttgcctcgatagtaacgtcgtaatcctttaacatctccttaatcaaatgccacattgtatcgtatccaaggtcaatatcgatacctttttctgtttcttggaataaaagtgatacgtttaaaacaccttcatcaagcacgaccgcaagcccgccagaattacggacaataacattgaagttgttttgttttaaaaaagaaataccttcttctaaatgcggaaggcgtgaatcttgaatgccaaggacaattgtattgtgatgaacccaagaacgcattgttgcggctgacttgccatttccaatgcttgtgcataatgtgtcatccattgcgaatgactgaagtgcatggaatgttggtcccaaactggattgatctacaatgcgccactctggctgagataaaatggaacgggaattgctcatataactaaccccttatctttaaaatgacaatctctattatagcaaaaaatgaaggatggagttttctcacatataaagggggagcttagaggtgaaataataaaaaggatgcattacatgcatcctttttattctgcaattttttctaaattaccgtttcggtccattcggaaagatgtttgagaacgttcttcgtcatccatgactgccaatttacgagctcggttcataatgttcataagtgtttcgtaatcttcttgtacagtatgagattgcttttctaatttttctagtttcttttctagttcctcattccgaaggatttgtgctttaatttcttgtttcaatctcgtattctcgttttcaagagctgtcacttttatatttgaagatccgactgtttgtaaaaaataaataacatcttgcattgtcatagagcttcttgcagcaggagcagtagattcttgatatggaatagcttctttatattgtacgattgattcttcttgtactaattcttcataatcagttatcgaatctgaagctggtggtgtataaagtaaacgttttttcgcttgttcaccgcttgcagcacgcattttatctttacgatgtttttttgctagttgaagagcttgttcatagctatagcgaacaacagcattccagcggaaaccacaagcagcagatgtacgatttaactgatcccctacttcctcaaatgcatttaattgcgtacttccttctctaacatgacgaagtaccgtttcagcaagtaataaatcatcctcatctgtccaagcatcttgtcttactttcatagattcaactccctttctttttatgaacttcctatttttataatgggcaaaaaaataaacttttatacaaagcttttaaaaatatggtagatttcgatgaaaggtaaaaattttcccatgaatggtgagcgcttctgtaggagagcatataaatatgtagcattatgtagagaataggctttgtagggaaacttgcaacgagcttcaaagagcggtaaaataccatttagtgtttatttttaaacgtacttgagaaaagtttaaaatagaggaagtgttatataatgggaaacgagtttcgcgtgtgcgatgactgtcaggcaacgaacgttaaaacgttagttccgaagttaaaaaaagtagattcatgtgcaacgattgaagttggatgtcagtcttactgtggtcctggtcgtaaaaaatcattcgcatttgtaaataaccgtccagttgcggctccaacagaagatgagttaatcgcaaaaattgaagcaaagttaaataagtaagaaaaagaagagtgaaaagattactcttcttttttatgcccataagaggaataatttattctgcgaaagtactcttgtatggacgaacgttttctaaaggatagacacaacttttgtattaaaattccaatttgtataaatttatatttcaaaataatggttgacagtcttttaaagcgataggtagaatagaagtgtctgattctgagaatcattatcaggaaaataacaattcacctaatttttttattactatttgagaataaatttcatttcaataaatatatgttgttagttaggatggttgagggatggaagcgagcgcaagcagtatagaacagcaagaagagaatgttaaagagattaagagcagaccgcttatcgcttctattattttagtagcgggtacagttttgttagctttaagcatggcagtttctatttcttttggggctgcagatattagtttaaagactgtatggcaagctgtatttcggtttgatggatctattacacatcataatgtaattcaagagcttcgcatgcctagagcaatagggggcgtagttgcaggtgcctttttagcggtatcaggagcaattatgcaaggtatgacgcgaaatccacttgcttcgccatcgttaatggggattacagatggggctgtatttggaattgcaattatgtatgcattttttcctaattcaccttatttaatgtttgttatcgcatcttttattggagctgcgtttggtgcaagcattgtatatggaattgggtcttcttcaccaggtggattaacacctgtgaaattagctttagcaggtgcagctattagtgctttattaggggcgatttcatctggaatcgcattgtatttcaatcttgcccaagaggtaagcatgtggaatgcaggcggagttgctggagtgaaatggcaaagtattaatatgttagtgccaattggccttgtttgtctttttatcgcaattatgatgtcgagatatattacaattttgagcttcggtgaagaaattgcaattggacttggtcaaaatacgacattaattaaatttatcggaacagtacttgttcttgttttaacgggttccgcagtttccatggcaggatcagttggatttgttggtcttgtaattccgcatatgactcgttttcttgtaggctcggactatagatgggttattccatgttctgcggtcttaggcgggctgttaattgaatgtgcagatatgttatctcgcgttattaacccgccatttgaaacgccaattggagcaattacagcgctaattggggttccattcttcctctacttagcacgtaatgaagggagaggaaagatgtgaggacgagtgtcttaacaaaaaagaacatttctatattaacgattttagtaggactaatcgtttctatatttcttattagtttaaatacaggaacttttaaaatcccgccaatggacgtattaaagtcattggttggactaggggctgaagatcagtctgttattttatttgaattccgcatgccgcgtatggtaattgctatactagtcggatctgctttagctatgtcaggtgcgattttgcaaggtttatcacgaaatccgcttgctgatccaggtattataggtattaatgctggagcgggattaacagttgttatattcgtctacttcttcttcgggaaagtagggactggtacatttttatctgtattcattcttccattcttcgcactagttggagcgatattagcagcggtaattatttatttactagcatggaaagacggcgtttcatcgactcgattaatacttgttggtattgccgttgcagctggatttggagctgttagtttaattttctctatgaagatgacatctaacgattttcgttttgctacgatttggctggcgggaagtctatggggtacagattggaaattcgtattaagtgtacttccatggatggttattttcttaccgcttgctataagtaaagcacacatattaaatgtaatgaacctaggcgattctacagcagttggccttggtgtaaacgtagaaaaagaaagacgtaaattattatttattgcagtttgtttagcaggtgcatctgttgctgttgccggtggaattggctttatcggtttaatggccccgcatttagcaaggcgccttgttggtggtaaacatcaaattatgttgcccaccgctgcgctaataggaacgtttttacttttattcgcagacgtaatttcaagaagtgtattaacaacttcagaaataccagtcggtcttgttatttctgtaattggtgcaccatatttcatttatttacttatgaggacaaaataaagggaggcttttcgtatggcaactttagcggtggatgcggtatctgttggctataatgaaggtttaattattgatggtttaacagttgaaattccggaagggaaaattacaacaattattggaccaaatggttgtgggaagtccacattattaaaaacggcgtctcgtattttgaaggcaaagcaaggtactgtttatcttgacggaaaagcaattgagaaacagccaacgaaagaaattgcaaagaaaatggcgattttaccacaaactgcagaagtgccaacgggtcttactgtatttgagcttgtgtcatatggaagattccctcatcaaaaagggtttggcacgttgaaagaagaggattatcgctacattaactgggcacttgaagtgacaggaatgaaagaatttgcgaatcgtccagcagaagcgctatcaggtggccaacgtcaacgtgtttggattgcaatggctcttgcacaaggaacagaattacttgtattggatgaaccaacaacgtacttagatatggctcatcaattagaagtattaaacttattgaaaaagttaaatgaagaagaaggtagaacgattgttatggttatccatgacttaaaccacgcttctcgtttctctgatcatatgattgcattaaaagcaggtaagttaatgaaacaaggaacgccagatgaagttatgacaagtgaaacacttcgtaacgtatttgagattgaagctcaaatcgttccatgtccagtaaactgtaagccaatttgtttaacatatgatttagcgatgattagtaatcaattgcgtaaaaaagcataagtagaaccccctcgtaaagaggggggcttctaatggacgttgagcttcttatatatgaatgggaagttgaacgcccgttagaatgggttattaacaacaattaataaatatatattaattaattgttatattcgtttcttatagttcattgtaacttataagataaatacagctagaaggagtgggaacatgaagaattttaaaatggcactattagcaatggtactagttgtgacttctgtactatttgcagcttgttctaataaagaagaagaaaagaaagcagatgcaaagactgaagagcgcactgtaaaacatgcaaaaggggaaattaaaattcctgcaaacccaaagaaaattgctgaccttagtggttcaacagaagaattattaattttcggtatgaaaccggttattactgctaatacatctcaagaaaaaattgatgcacatattgaaaagaaactaaaagacgttaaaccagttggttctgcttggggcgataaaattaacattgaagcagtagctgttgcaaaaccagatttaattcttgtaaataatcgtcaagaaaagatttatgatcaattatctaaaattgcaccaacagttatgttaaacactccattagatcaatggcgtccaaaattcgaagaagtaggtcaaatcttcggtaaagaaaaagaaacaaaagaatggttcaaaaagtatgatgaaaaagcaagcaaattacatgacaaaatcgtcgctaaaactggtgaagcaacatttatgaaaatggctgcatatccaaatgctttccgcgtatatggtgattacggttacggtagcgtaatctttaatgatttaaaactaccagcagttaaaggtacaccaactgataaaccgttagtacaagtacaaaaagaagctttaatcgattacaacccagattacttattcgtatttacaactggtgacggttctcagcgcttaaaagaattccaagaagaatcaatttggaaaaacatgaacgctgttaaaaataaccacgtatttacaattaaaaatgaagacttaaacaaaggttacttcccactagggaaagatatgatcttagacgaagttgctgaattcgttttaggtaaataatgtataaaggaaatcacttttacttcggtaaaggtgattttttctttttataaagggaattaatacagtctttcatttctttctgtttctcatttcgtttataatataaagtaagaatgtagtaaagaaagggggatgtcggaaagtggtatatttaaacgacaaactcagcgaaacaaaagtgtttaaagacccagtacataaatatgtgcacgtgcgtgatcgtgttatttgggatttaatcggaacgaaagaatttcaacgcttgcgccgtattaagcagcttggaacgacattttttacatttcacggtgcagagcatagtcgctttactcattcgttaggtgtatacgaaattattcgtcgtatgattgatgatgtgtttgatggcagaccaaattggaatgctgaagatagattgttatgtttatgtgcggcattacttcatgatgtcggtcacggcccattttctcactcgtttgaaaaagtattttcattagatcatgagaaatttacgcaaaagattatcgtaggcgatacggagattaatgatgtattaagtcgtgttgataaggagtttccgcaaaaggtagcagatgtaattgcaaaaacatctactaataaattagcgattagtatgatttcgagccaaattgatgcggatcgtatggattatttattaagagatgcttattttacaggcgtaaagtacggaaacttcgatatggaacgtatactgcgtgtaatgcgtccgtatgggaatcaagtagtcattaaaaatagtggtatgcatgctgttgagcattacattatgagtcgttatcaaatgtattggcaagtatatttccacccggtaacgcgaagtgcagaagttattttaacgaagattttacaccgtgcgaaatcactgcacgagaagtattatacatttaaaaatcatcctgttcatttctattctttatttgaagaagaagtaacagtagaggattatttaaagttagacgagaacgttatgtattactacttccaagtatggcaggaagaagaagattcaattttaagcgatttatgccgccgttttatgaatcgaaatctatttaaatatgtagagtttacagataaacacggtttagataattggatggaattaagtagtttatttaaaaagattggacttgatccggagtattatttagtagttgattcaacatcagacttaccgtatgacttttatcgtgcaggagaagaagaagagcgtctaccaatcctacttcttatgccaaacggagagcttagagagctttcacgtgagtcggacattgttgaggcgattacaggtaagaaaagaacggatcaaaagctattctatccacatgatttaatctatgaagatggaagaaaaggaaaatataaagagagaattattgagttgttagaaggaaagaaataagaagcagctaatggctgcttcttatgaaaaaacttgaaattatttgtcacttaagcgttttccgccaactgcataatggtttttagacatttcttcgatgaaaacaacgatgttttcttcaggagcaccagttgtttcgcttactgctgctgttactttctcagcaagagctttcttttgttcttctgtgcgtccttctagcattttcactgttacgtatggcatgtacaatcgctccttttatgtaagttacactcttattatagcggattatggggaagaacaatcgaaaaaacaaataatttctttttttgacatatggaagaggagatgaagcatggatcagttatttagatacccgttgcaccaaattcctttggtagcaatggccattattatcgcattatcagttcatgaatttgcacatgcatatgtagcatataaatttggagacgatacagcaaagagacaaggccgtttaacgttatcaccgatggcacacttagatcctataggtttgattgcagtattaattcttggattcggttgggcaagaccggttcctgttaacccatataactttaaaagaccgcgtcttgcaggtatattagtttcaattgcagggccgattagtaacttaattttaagcgcaattggtttaattatttggtatagcttagtaaaatttggtgtattatactcaattccatctgcagtagcagatacgttagctcaatttttccagatttttattatgctgaatatcgttttacttgtatttaacttattaccgatcccgccacttgatgggtatcgagttgtggaagatttagcgccagcaaatattcgcgcgaaaatgacacagtatgaaaaatacggggcaattgcgttattaattctcgttattacaccgcttagtaattacacaattcaacctattttccaggtagttattccgcatgtatttgtatttttagatagcattattgcgcctatttttggccttttataatttttaagtgaggaggattttacatatgacagagaaaaagaaaaaaatcggttttaatatcgtgaaaaatgattcaacagatggacatggtggatttggtgttggggcattaagcttagaaaacatttcacctgtatttgttgatgtactagagaaaactgcattcgttgatattggtgcgatgcacgcgcgtagtacagtagaaaaaggtattaagtttttaacaaataaagatgaagttccaaacggaaaaccattttggcttgtttgggtaacaattgaaagaactgcgacaggtgcgtattatgcaggtgtaacagcttgtgaaatgacagttgaccgtgagattcgccgcggatataaatcacttccagagcacgtaaataaaatggataaatcattgaagcgtcacattatggttgaccatatggatgaatcatctaaaaaggtacttggtacgttcttgaaagaacataatgaagcgatttggaacgaatctagtgaagaattacgccgtgcattattaagtgaataaaaatagctgacggatgcccgtcagctatttttttaccaaggaagatattttttccaccaacttgtttttttcttttcttcagtcgttttttcaaattcttctttatcatcgacgtgatccatacaatattcagtcggttcggtacctttagcgaaatacattttcacagaaataggacaattttttgtagcaattttaccgttctctggattgatattaaccgctacgacgtcacttggttgtttaaattctttttttggttgtccctctaaccctttctccatcgtatcagtccatattttcttcgcatatccttgttctgctacgtttgaaatagatttaggttgatcatatccgacccacacaccagttacgatttgcggagtaaatccgatcatccaactatccgtttcagtagaaccagatttgccggcatatgttcttgatagtttggataacatcgattgaccagttacagcagcatagctgcttagtttcttattaaacataccagtcatcatttcttccattacaaacgctttgctcttgtcgagaacttgtttactctctaaatgagcatcgtataatatatttccttcatgatccataatgcggcgaatgaaagtaggttttacttcttttccaccatttgcgaacatgctataagcgttaaccatttcaattggttttactggtgatgtaccaagagctagagaaggcacatcttttaatgcacttttaattccaaattgtttcgctgtttttgcaagcgcgtcatcgcctaaaaacaaattcgttttcacagcataaatgttatcagagactgcgagagcttgtgccattgttacgaaatcatctgcataataatctttatagttcttcggtttatactttgaaacgccgtcacctaaagtgaatacagtatattcgctttttaagcgcgtagcaggcgtgaatcctcgttctaatgccgcataatatagaaatggcttaaatgtagaaccaggctgacgaatggcttgtgtagccctgttaaattgactcgtagtataatcagttccaccaacaagagcagccacttcacctgtctttggattcatagagacgagagcagtttgtatgtttgttgtgtcaggtatgtgatcttttacagcttgttctgctacagcttgtagtttagggtctagcgttgtataaattcgcaagccaccccgttgtaaagcttgttcgtctaatccaacatcacgaaggagcgaagcttgtacagcatcttggaaatatggtgcgacctctgctacttttttcgtatctaatgaggcaaaagttagtggctctttcttcgctaaggctgcttgttgcttcgtaatatatccttgttctaccatttcatctaatatgagagcttgtcgtcctttcgcacgatcctctttcaaaaagggagaatagacacttggccctttcgggatacctgcgagcatactagcttctgctaatgttaactcttttgccgttttatcgaaatatagacgggatgcagcttcgatgccataagcgccatgtccgtaataaattgtatttaaatatccttctaaaatatgatttttattataattcacctcaaggcgaattgtgtacattgcttctaatagtttacgtttccacgttttatcatgatctaagtaaaggttacgagcatactgttgtgtaatcgtactagcaccttggacttttgccatcgcttttaaatcggcaacaatggcaccagcaatacgtttcatatcaaagccatgatgtttgtagaatcgttgatcttcaatagatagtgtcgcctcttttacataaggtgaaatttcattaagagatacattgtaacgtttttgcatttcattactttgtcctataacagtgtcatcatttgcgtaaaagacgcttgtttgcgggaccgcaacaggaggaggtcccataatttttgcaactataataataacaaaaaaagaaaaaacgaagaaaaggacgcaagaaaacattgcggtgaagaaaagacgtttatattttttaagttttggattcatagtttgatccatcttttttcagcccctcattaatacaagcgttattgtattagtattgagggttttcatttattttaaacaatgaaatttcgaaaataaaaaagccccttccattaagaaaggagctcaaaggcacgtgctggccaatcagtaatgatgacatctacaccataatcaatcatagtttgtaaatctttgtattcattaattgtatatggacggaaaacatacccttgctcttgtgctaactgcacaaattctttcgttaataactggaagtttggatgtaatccatttgcttctctatgttttgcttcggcaattggatcagaaagtggtgtatcatataaaattgctcttgggatttcaggagcaatttctgctaataatgaaacagagtcatggttaaatgatgaaaatacaatttgattagaaagatgatattcacgcacaagtgcaacagctttttcctcaatctttgggtaatgaataacatctgtctttaattcaatatttagttgtaagttcgttgtggaaagccaaatgaaaacctcacgcaacgttgggatttttgcttcatggaaagaagggtctttatagctaccagcgtccaatgattgtagttcctctaccgttttttccgaaacaagtccaacgccatttgttgtacgatcgacggtttcatcgtgaattacgacaagttcaccatcttttgataagtggacatcgagttcaattccgtgagcgccaatgcgttctgcttcttggaaggcaatcatcgtattttcgggatgtgttccttttactccgcggtgagcgaaaataagtggtttactcatgtgaaattctccttattatctcttttctttcattatgaaactgctttagggaaaatacaattgaatatgacaaacatttacaaaagtctaacagttgcacaaaagttaacgttaacgtaaaatgtaataatcaagtgaagggaggaataaacatgtataaaattgatgaagtaacaaagcaagttggtttgacaaaacgtacacttcgttattatgaggaaattggtttaattcatccccctgaacgtagtgaggggaacattcgcctgtatacagacggggatatcgccagaattaaaaaaattgtggaagcgaaagaagtgttaggaattacgcttcaagagatgcagcattttttatcgttaaaagaaagaatggagcaaagaagaaatagcgaaaaccctcgtgatcgtgaagtgattcaagaaattaaagatatgcttgaaaaacaagtggaaacgctagacgaaaaaatggagcaaatgcaacgtgtaaaggcagaactagaagatagtttacatcgtgcagtaacatttttagagaacacaaaaggagagtaatcaaaatggagagcaaacaaaaactagggagattgattacagtggtggctaccttccttgccttttcgggtataggggtagttgacccaattttgccaattattgctgagaaaatcggtgcaacgcattggcaagttgaaatgttatttaccgcttatattttaacgatggcaatcatgatgttaccagctggaatattcgcatcgagatttggtgataaacgaatgatgacgattggtcttgcgatcgtgactgtatttgcgtttatatgcggtatatcgcaaacgattgctcaattatctcttttccgcgcaggatggggattaggaaatgcgatgttcttcgcaacggcgatgacattattgattgcattaagtaaagaagttcatgaagcagtaggattgtatgaagcagctatcggtttagggatggcaggcggaccgttattaggcgggatattaggtggacattcttggcgttacccattttttgcgacgagtattttaatcttcttagcatttattttagtattcttttttgtaaaagaaccggagcgaaaagtgaagcgtaaggctgctggggtaggagaattacttaacctggtgaagtataaaccgtttatgcaaggtgcgatttcaggaatgttatactactacggatttttcgttgtgttagcatattcaccacttattatgcatttatcagctattcaattaggctttgtattttgcggatgggggcttgcgttagcttacggttctgcaattttagcacataagctagaagggaaatatgaaccaaaaacattattaaagggtagtttactcgtatttgcgattttcttaattgcactattctttgtgaaaattatgtggttacaaattactcttatcgttttatcaggattggcatctggcttaaacaatgcattatatacaagttatgtaatggatatttcaccttatgaaagatctgttacgtcaggtgtttataactttgttcgttggttaggtggtgcgattgctccaattttatcaggaattatcggtcatactgtttcaccacaaagtccgtttttagtaggtggaattgttgtgttagttggttgtattatgatcctaattccaattcgtaaaccagtagaaatagagacaaaagccctttcttaagaaagggttttctttccttttgcggtgcaaaccctttccgcacatatgttagaaccctctgactaaaatatattttcggtatttttgtacttttaactatacattttggatgttttgttttatttttgttaggggacattaatgatgtccctattataaatttgcattgaaaggcgtgattgtacgatggaactatggttcactgaaaaacaaacaaaacattttgggattacggcgcgtattaaccgcacattacatacggagcaaacagaattccaaaaacttgatatggtcgaaacggaagagttcggaaacatgcttattttagatggcatggttatgacaacagaaaaagatgagttcgtttatcacgaaatggtagcacacgtacctttatttacacatccaaaccctgaaaacgtattagttgttggtggcggtgatggtggtgttattcgtgaagtgttaaaacacccaagtgtaaagaaagcaactcttgttgaaatcgatggaaaagtaattgagtactctaaacaatacttaccatcaattgcaggcgcattagataatgagcgtgtagaagtaaaagtaggagacggtttcctacatatcgcagaaagcgaaaatgaatacgatgtaattatggtagattctactgagccagtaggaccagcagtaaacctatttacaaaaggcttctacgctggaatttcaaaagcgttaaaagaagatggtattttcgttgcacaaacggacaacccttggtttacaccagaactaattacaactgtgtttaaagacgtaaaagagatcttcccaattactcgtttgtacacagcaaacattccaacttacccaagtggtctttggacgttcacaattggatctaaaaaacatgatccattagaagtaagtgaagagcgtttccacgaaatcgaaacgaaatactacacaaaagaattacacaatgcagcattcgcattaccgaaatttgttggggatttaattaagtaagagaattgtatcaaacaaataaagtgtaagtagctcatttaaggtgtttgtccagaagacttgaacatgctagctacttacacttctgtagagaaaatcgtcttcttgttgttaaaaagaagacccggtaaatcgagaaagaggagcaattcgctccaaatttgagaaatagtgaaaggttgggataccttaagttccacataaggaggaaaagaatatgcgttttgatgaagcttattcaggtaaagtatttattaaaagtcatccaagttttgaagagtcaaaggtagttatttatgggatgcctatggattggacagtaagttaccgtccgggatctcgttttggccctgcacgtattcgtgaagtatcaatcggtcttgaagaatatagcccgtatttagatcgtgaactagaagaggtaaaatattttgatgcgggtgatatcccattaccattcggaaatgcacaacgcagcttagacatgattgaagagtatgtatcaaaacttttagatgccgataagtttccactaggtctcggcggtgagcacctagtgtcttggccaatttttaaggcaatggcaaaaaaatatccggatttagcaatcatccacatggatgctcatactgatttacgtgaatcgtatgaaggggagcctttatcccactctacaccaattcgtaaagtgtgtgatttaattggtccggaaaacgtatattctttcggaattcgttctggaatgaaggaagaatttgaatgggcgaaagaagtaggtatgaacttatacaaatttgacgtattagaaccgttaaaagaagtattaccgaaacttgctggccgcccagtctatgtcacaatcgacattgatgtattagacccagctcacgctccaggaacaggaacattagaagctggcggtatcacatctaaagaattattagattccatcgtagcaattgcaaattcaaatataaatgtagttggagcagacttagtagaagtagctccagtctacgaccatagtgatcaaacaccagtcgcagcaagcaaattcgtgcgggaaatgctgctcggttgggtgaaataaaagcggaagcggctcgctcagaatgtgagggggatggagtttcagacgtagaggcgctttttgcctcgaaggaagaagcgaagccaccgatcattctagccgctgcagctagataaagtaagagccctctatatgattagagggctcttattttgtcgttatgtgtcggtaagtcgatatattaaaaaaatcgctgatataattcgagttgcgccgatatattaaaaaaatcgccgatataattcgagttgcgctgatatattaaaaaaaccgccgatataatttcatttaccgttacgcaacacaaaaaaaagctattctcaaacgatgggaatagctctttttcttatgcaaccttctcttccgaagtaactccgcgaatttcatcagcagagcggattggatatttacggaacacaatagatccgatgtatccgacaatagtggtaacgattccacataatatagcagcaattgttacttttacaacgtcattaaatccgaataggacaagaagtcctgggattggtgatgctgttcctggtgcattattaacaagttggaatagcgatgtaataataccggcaagtgcaccgccaacgaaatttgtcatatagataggaattggatttgctgagacaatatcggcttgtgttaaaggctcgattgctacagcaattgtatctttctttgaacaaatttttaatcgtttaaagaaaataaagttcatcggggctgaggcggcaacggcaagactaccaatcgccattggtaaacctgttaatccaagcattgcagttagtgccatagaacttagtggagaggtagaaataactgttattaatccaccaagcataatacccataatgataggactttctgtagttgcaactgaaatcatagaaccgattttaccgagtgttgcgttaacaagcggatccataagcattgccattccgcgtgagattggtgcagcgataaataggattgctaaaaattccacgccagctggtaatttcttttcgagaaatttcacgacgaaagcacaaacgtatccagcgaaaaatcctggtaaaataccgaatccactagtagcaataccaattaaaacagcgtatacgggggaaacaccgattgctaatgcgactaaaatcgctgctgcgacaccgctcatactaccggaagcttctcctactgattgtaaaaagtcattatgaaacatttctccacctatataacggtgaaatgcttcaataagaaaacttgcgattgctgcattagctaaagcacccatcgccttcattccataaggcgcacggtaactaaaaagtgtaaatagacaaagtacaacaagtaatagtgctaaaccttgcaagatagccatttgaaaactgtctcctttgatttttgtaataaaaattcgtatcattcaataataatataaaagtgtatgaaacggaaaaattttttcttgggaacttgctgtaagaaaaaatcccttacaataatgtaaggaaagtgtaagacttttagatagagtatagtatgctcttttccgtataatacaagtatagatataatactagtgagaaagaagtgcaaacaggaggttcatgtatgaaattggtaattaaagttttagctatattcgccattattctaggtggaacagcgtattatttgaacacaaaaacagaaggtgtacatgcttttgtagacaacttcttttcaaataaagaaatacaagattattatgcggttatagataaaggtgagaaaaaagacggagaatacttgtatacttttaaagggtatacagaagacggaaagttacagatcattaaaagaatgatgaaccgtgaattgcatacgggggcgtttataaaaatttatgcaaaaggtatgcaaggaaaaggatgggctgaaatcccgaaagaatctattccacaaaaagcgttggaaaaaatagaaaaaccataaaaggagcgactcattcgctcctttttagtgcgttaaaatagtgatagatgttttttccttgttagaaataatttttgcacgtccaccaattgggaaagtgaaaatcggggttgtatgcccgaaacttgcgtttgcaatgataggaatatgtgcaagttcaggttttgaagcaatcatttcttgaatgtcttctatcgtacattctgcacctttttgcatctttcctataatgattccctttatgtattcaaaatcttgctgctgcataagggaatgtaaataacgatcaaaagttttaagagtagatgttccagttaaactatcttcttcaataaataaaattttgtcctttaaatttggcatatatggtgtgccttgcagtaagttaaatgtgctcatattgccaccgataatatctcccgtagcttctccttcctgaattgaaacgtatccttcatttttaataaattctcgattttcctgatctatataccaagaatcatcgctccatgtttcagatggcaggacttcaataggctcattagaagttaagcactttaaaaagtaatcggttgtatactcgagccctttctccattccaaaggaagagaaatggggtcctgaatatgtaacgagacctgtttttgcgtaaattgcattatttaaagcagtaatatctgaataaccacagaaaaatttcgggtttttatgaattagatcataatcgagatgtttcaataaaccattggagttgtatccgccaagtgtcgtcaaaatagcttttacattagggtctccaaatgctttatggaggtcttgaatgcgggaagaaatagaagaggaagcaaatcgatctatctcatcggcatattttgagaatgtaacttgaaagcccatgtcggttaatctctttatagcaagttttctattttcatttgaaacaatacttaaactacacgatggtgaaatcactcgtatttcatcacccttttttaactttgttggtatcactatattcacctctttaattgaaagaatatttagatttaaaaaatattttatcgtatgaaataaagtagaagtgaattattttttgaaatggagttttcctgatttttcagcagacagacagagtctttttttgatatgataggaaaagtgatttattataagtagtatttaatatctataacatttgaaaggtgtgcaagacgtggagaaacaacttgcaggcttgccggtacacgttcatttcgtaacagaaatccgtgaaggggcgaggaaggaaaccgttgcttttgaagcaaatggtcaatactatgtaaaaggtcaaggtacatatgtaacattccaggagccgaacgaacaaggcgaagtgaaaacaattattaaaattcaagatgaacaagttctcattatgcgttcaggtgctgtttctatgcgtcagacgcatgtgaaaggtgaatggacaactggtacgtatacgagtgaacttggtacgtttgcattgcaaacaaagactgataacgttctttttaaatggtcggatgaaaagaaaaaaggacaactcttcttaacttacgcattgcttctaagtgaacaagaagctggcagatatactattacaattaatttgaaggaggcaaaataatgaattccttagaacaagtaaaaggattgattaaagaagaaattcaggctgctgtattaaaggcagaattagcgacagaagaacagattccaaacgttgtattagaatctccaaaagataaaacaaatggtgacttctctacaaatatggcaatgcaacttgcacgcgttgcgaaaaaagcacctcgtatgattgcagaagaactagttgcaaacttcgataaagcaaaagcttctattgaaaaaatcgaaatcgctggtcctggttttattaacttctatatggataatagctacttaacagatttaattccaacaatcgtaaacgctggtgaagcttacggtgaaacgaatactggtaaaggtgaaaaagtacaagttgagttcgtatctgctaatccaacaggtgaccttcacttaggacatgcacgtggtgcggcagtaggtgacactttatgtaacctattagcaaaagcaggctacgatgtatctcgtgagtactacattaatgatgctggtaaccaaattcataacttagctctttctgttgaagctcgttacatgcaagctttaggcttagataaagaaatgccagaagacggttaccatggtgcggatatcattggaattggtaaacgtttagcagaagaattcggcgatcgttatgcgaaagctgatgaaaaagaaagctatgaattctaccgtgagtacggtttaaaatatgaattagcaaaacttcaaaaagacttagaaagcttccgcgttaaatttgatgtatggttctcagaaacatcactatacaaaaacggaaaaatcgatcaagctcttgctgtattaaaagagcgtgaagagatctttgaagaagacggcgcaacttggttccgttcaatgacttacggcgatgacaaaaatcgtgtattaattaaaaacgacggttcttacacatacttaacgccagatatcgcgtatcaccgtgataaattagagcgtggttttgataagttaatcaacatttggggtgctgaccaccacggttacattcctcgtatgaaggctgctattcaagcacttggttacgataaagacacgcttgaagtagaaatcatccaaatggtacaactataccaaaatggtgaaaaaatgaagatgagtaagcgtacgggtaaagcagttacacttcgtgagcttatggaagaagtaggcgtggacgcaatgcgttacttcttcgcaatgcgtagcggtgattctcatttagacttcgatatggacttagctgtatcaaaatctaatgaaaacccagtatactatgcacaatatgctcatgctcgcgtatgcagtatccttcgtcaaggcgaagaattaggattagctgtagatggagatgtgaactataaacttgttacttctgagaaagaagtagagttactgaaaaaacttggtgaattcccagcggtagttgcggatgcagcacaaaaacgtctaccacaccgtattacaaactatgcatttgaattagcagcaacattacacagcttctacaatgcagaaaaagtattaaaccaagataacttagaattaagtaaagctcgttatgagttaatgaaagcagtacgcactacacttcaaaatgcattagcaatcgtaggagtatctgcaccagaaaaaatgtaatgaagaaaagcggaagcggctcgtttagaataggagggggatggagctcctgacagagaggtgtactttgcctcggaggaaggcgcgaagccaccgagtattctagccgctggaactggacaataaagaaaagcggagccgactgtttagtcccgaaggctaaggttctttcccacagaagatgcattttatcttctcgtggggaaggttcttagacagaaggggctaggaggcagagctggacataaagaaaagcggaagcggactttcgtttttaaataaaaggcaatcacacgatgttgtgattgcctttttatgtggagataataaaaaaaatttatcaaacaaaaggggaatttgcgtcgtcttatataaatgacaggaggcttatgatggaagaaaagatagaagaattaattgatatatataagcagcaaatatattccttatgctataagttagcgaaaacgaaagaagatgcggaagatatttttcaagagacgtggataaaggttttttcatcaaggcaccaacttttttatgtggataattataaaaagtggattactacaatttgcgttcgtacattttatgacttttaccgcaagaagaaaagatggaaagatcgcgtcttagatttatttcataaagaagatggtggagaaatagatttcgcagatgatgtgaatatatcagaagaatttattcaaaaagtggaagcggaaatgatacgggaagttatacagctattgaatgaaaaatataaaaccgtgctcgtactctactattatgaacaatactcttataaagaaatgagcgaaatattaaatataccgattggtacagtgaaatatcgccttaattatgcgaagaagcaaatgcgagaacatttggaggggttcgtttatgacagaagataaatttgaacagaaggtaaagagtagcttagcagaagagataactccaagcgaagagctaataaataacacgaagcagggcgtgcgaaaggctcagaagttagagaggaaatggatgatttgtattcacaccatttggattgttttgttaacaattgttatagaacaatttgtcacacatttggattataaaattcctatgttgatagccattgtgattatgatgcatgtatacattccgatatatgttgtaatacagtcatttttaaagaaggagtatagattacatgaaagagttcgctaatccgtttgtactatttgaagtagctggagtgacgatgtttttagcttttatagcacttttaatatgtgttgcatcatgggtatatacagatgctaaagcacatcaaatgagcaaaggatggagtattttagcagttatattgccattctttattgggtttttattatatatggtaagaagaagtaaaaagaaggttgaaggagaatgtaaggtgaattttgttaaaaaacagaaagtaacattagttgcgatattggcaagcacaatgtttgtattacttagtgcttttacttttgcacaaacgttagatgatgcatggagagccggggatatatatttagcaaatgagaagcaagggaaaacaagttatgaggcaaaattctcatcatgggatattgccagtaaggatattgaatttcagtatgaaaaggatacagaagtgacattttcttatgagacagatgcaaaacgaggaaacttatgttttagtgtgtatgaaagacaaggagaaggtataaaagagttaaaggaaatttgtgaatcgaaaaaaggtacttttacagttactttaaaagcaaatgaagaatatgtattgaatataagcggattaacagtaaaagatggatttgtaaaagtgaattggcaagagaaataaaaggggccctataaaggacctcttttttattgaatagtataagtaacagaaaaactaacaggactatagtaaacgtaaggtgcatgaaattgaacatacatatttccatctgtttttgcagtgaaaattcggccgtaaccatcagaataacgtccaattaggttatgatttgagtcataaacactgtaactaggagttttgctgttaggatgaattgttagttcttgtcctttttgaaggaaaataggttcttgttcagaactacctccagtttgcaaagaataaaattttgtaaagctttgttcttgagcggcagcagcgacttttgtttcaggaataaacgcagtagctccagtaattcctgctaaagttaatgcacctgctaaaatcatttttttcataatagaaaaagcctccttattagttgtaatcagttttgttacaattaatattgtatacgataatgggtaggataaaatatgcttttatgcatatatattttttctcaataaaagaccaccgataaatgaagtgcaccccaattgttagacacataactaacaattggaggtgcattttttagaataacgttttttgacacttgggggtagtgcaaattcttaagttgatgggcatgggggcttaccatgaaattcattacttttttcgtcggattaattattgttttcttgctcgcttatattgctagcaataataagaagcatattaaatttaaaccaatttttatcatgcttattatacagttaattttaacctatttactattaaatacagaaatcggcctcatacttattagaatcatttccagtttgtttacaaagctactcgagtatgctgctgatggagtaaattttgtatttggtggtcttgcaaataaaggtgaaatgccatttttccttactgtattattaccaatcgtctttatttctgttttaattggtatattacaacatttcaaaatactaccattttttattcattggatcgggtactttcttagtaaaataaatggtcttgggaaattagaatcttacaacgctatcgcctctgccattgtcggccaatcagaagtttttattacagtgaaaaaacaattagctcaaattccaaaacaccgtctttatacactttgtgcctccgctatgtcaaccgtatctatgtctatcgtaggtgcctatatgacaatgattgaacctaaatatgtagtaactgcactcgttctcaatttatttagcggttttattatcgtactcatcattaacccttacgacgttaaagatgacgaagatattttagaaatcaaaggtgaaaaacaaagcttttttgaaatgcttggagaatatattcttgatggttttcgtgtagccattgttgtcggcgctatgctcatcggatttgtcgcattaattagttgtattaatgacttgttcctcattatattcggtattacgttccaacaattaattggctacgtatttgcacctatcgcattccttatcggtgtaccaagctctgaaattgtagcagctggtagcattatggcaacgaagcttgtaacgaatgaatttgtcgcaatgatggaccttagtaaaatttctaatagcctttctccccgtacagttggtattatttctgttttccttgtatcttttgccaatttctcttccattggtattatttcaggtgcggtaaaaggactaaacgaagaacaaggaaacgttgttgcgaggtttggccttaaattactatatggagctactctcgttagtattttatctgcaattatcgtaagcattatgttgtaattaggtaaaattttatcattttcttatccctatcttttgtatacaataacgaataggtgtcttataaagtgaaactttaatcagagtggggctatccccactctgattattagccttcatcaatcgggtatttacgggcagttatctcccacctaacttcattgtattcactggactttgaggtgggcgttttactgctcgttaataccggataaataatcaagacatctattttttatacatgtacaatcgcttttatttagcgtaaaatattttttatgtgtttgaatacacttctaaatgtatacactttgatagttttaaaggagaaaaaatgatgaaatccgacacgaacaacgatacgcgagccaaaaaaggacgctcaaagaaaaaacgcctactttggttccttcttattccattactaattgtagcacttggagcaggaggctactccttccatatatacagtaaagcaaagtccgtcttaaataatgcttatgctgaactaggtcgaggagaaaagtccagtaaacgtgaaaaagctgttaaacctatgaccgacaacatttccgtactaattatgggtgttgatgaaagtgatattagggaaaaagattatggaaaagcaactcgaacagatgcgttattacttgcaacaattaataaaaacgataaatccgttaaacttgtaagcattccacgtgactcacgcgtctacattaaatcacgtgataaatacgataaaatcacacatgcgcacgtattcggtggtgtagacagcacaattgatacggtagagaactttttagatgttccagttgattattatgtaaaattcaattttaaatcctttattaaaattgttgattctcttggtggcattactgtggacgttccagttgaattcacagagcaaaatagtaaagatgaagcagatgcaattcatctaaaaaaaggacgtcaacatttaaatggagaagaggcactggcactagctagaactcgtcacatcgatagtgattatatgcgtggccaacgacaacagcttgtattagaggccattgctgaaaaggcactatctcttaattccattaataaaatcggtggcctactagacgctgtcgataaagacttaaaaaccaatttaacttttgatgatatgatgacaattacaaaaaattcaatggattcaaatttaaagatggaaaaaatgcaagtagaaggtacagataaatatataggtggtatttattattacgtgccaaatgaaaaaagcgtcgatactatttcaactacccttcaaaaacatctcggtgttacgaataaaaatgaacataaaaaattataataaaaaggctgctagatcattctagacagcctttttattatatttttcaacatatttttcatacacattgtgacaagaagtgacaattattacagcgatgtaacattttttatgaaaaaattacacacacagtgaaaataatagtatactagtacgtacataatgttattttcatcatttttatacaaaaaatgtaatacatatatttatacataaatttctggggggaaataaatgaagctaagtaaaatactgattggttctgcaattgctgggggcatattactttgtgtaggcggtgttgggggatatcaatatgtatccaaattaaataatcaattagatactactgcattaccaaatactacatttgaaggtatttctctcgatggaaaaaataagaaagatattcaagcaattattaatcaaagggtaactgaattagatcaaaaatcccttacctacatattccaaaacgataaacaaacttacacatggaaagatttaggggtaaattataaagagaaagatattattgacaaaatcttcaaagaacaagaaggaaacgtaatgaatcgttacaaaatgcgcaagcaagctgaaaacggtgaattaaaacgtgactataaattaacaccacaattaaatgcaacagcttatgaaacctttataaaagataaatataatgaaacattaaaaaatcctgttaatgcagaattaagcattgaaggctcaacagtaaatgttagtcaaagccaaaacggagaaaaaattgataaaggaaaactaaacagtttaacaaacgaagctattactactggtaaatcagatgttacattaccagttacattcataaaaccagaacgttctacagaagatatacagaaaatgggtattaaagaagtcattgctgaatattctactccaatggctggccgtaacggaaatcaatcatttaacgtaaataagtcagctaatactttaagtggggttattgtggcacctgatgaaacatttagttttaacggccgcgttggcgtaactgatgctgcacatggttacaaatctgcagcagtatattcacaaggtaaagtaatacaaagtgcaggcggaggagtttgccaagtcagtagtactttatacagcgccgctttaagggctgatttaggaattgtttctcgaagcaatcattctatgccagtaaattatttaccacttgggcaagatgcagcagtagcagattatggtccagatttaaaatttaaaaataatacaggcaattatatttatattcaagcattttcaaatggaggtagtattactacacgcattttcggtacaaatactggtaaaaatgttgaagtttcttctcaagtaattagtaggactagtgataaaatcacagcggttacgtataaaaaagtaacacaaaacggggaagtaatatcaaatggacaaatttcaaaaagtgtatataaaagcgccccaaaggaatagatactatcaaccgaatagtataaagaaaaaggcgtgattaaatcacgcctttttcttttgcagtaatagtaaaaaagtttcaagatggtctttcgtttcttctaaagaccacatacgatttccttgcttcgcagctaatacacacgcctcttcccacgcgttctttttcttcatatttattaattcatcacgtaatttcaaaacaatttcttcgtcttcttgttcaataaactcttccatcacgcttactatttcatcctcatgaatacttaacgtacagtacgatttaagaaagtattgtaatgtcgtatacataatgtactcccccttcttatttatcagatggataagaagtaataatcttaaaccctaattcccctgacttatctcttgctaaaacagtaacagtttttactaacttgtcttttacactcatatttttctttattaccgtttttccaacagggaatgaatgagttgtatttaatacgagacgagcctctttagaattttttaaccaatcttgaatttccttgtcatgttgcttcaagctatcttttacagctttcgtcgctgtttctttatcatagtatgtacttgcggctgacactttatctgtcttcaagcgattcttcaaatcctcttctgacttgcctacatgtctttcaatcgtatgaccatttttaggtggtccttccatttcatctaaaatattatcactaattttttctaccgatgcagcttgattccctgtctgtttctctgatttttgttcttttcctgcacatccacttaagatcagcattaatgccaataaactactgaagaaaagactacttattcgtttcatcatatcacctcttccatgattattatcgcaacttcactaaaagtcaatttcacaacgaaaaaatctatcatttttcatttttttcatctgtttttccatatttaccgcgcaatttcatcaaccctctatttttcgccttttataatatataccccctatattttataattatttcccagataaaatcgccaataacataactataaaactcttttatacaaaggtttttatagtgtttttaaaaataatttaaaatacccctgtttttatatacataatacctgtataaggtataaacaccattcttatcaacgtttttctacattatgtaaatttacccttgcctatacaaacgaaatgtggtgtaatgcaaaaaaagataaaggattttaaacaatggctgaaacgattcaaaatttcttaacagaatactattcaatcgcaattccacttagtatcttaattaacatcatcattagtcttttaggtgttattcctagcatctttttaaccgccattaacatacagctcttcggtgtaaccaatggcacaatcatttcgatcgcaggtgaggccttaggggctattatctcgttttatatttatcgcatgggccttcaaaagttcactcacgataaagtcaataagtacccaaaggtagagcgtcttctttatgtagaaggtagagaggcctttctactcgttctatcgtttcgattgatacctttcatcccatcaagtatcgttactttatttgcagctctagggaaaatgtcattactctccttcagtattgccagtacaataggtaaaataccggccttattgattgaagtatattcggcataccaagtcatgaacggaacaaatgaagcgaagtgggttgtaacaatcgcaggcgttattggattgttttatttgtggaaaaaatggagaaaaaaataaagaaggagcataggctccttctttatttttgaggtattttattaatagctatccgttaagtccttagttaataccaacagcactaaatgattgcttaactgctgctacttcagcagaatttgcaccatataagtctgctgcagcttgtactgcaccagcacgagcttgactaaatgtagtagattgcgtgaaatactgtgtatttgcacggtagtaaatcgcacctaatttatctttgccgataccatttacagttacaccgtaatgcgtaccgccatttgctaataaataagcttgtttattaataatgccgctgtttgtatgaacgccaccgttatcacttgaaccagtgtaacgcttagaataatggtctggatcaccatacttcgtaggatcactcatagagcgaagcgcgtctcctgctttaccaggtgtgtaaatatcttcaccaatctcccaatccgggttacggttatcatagaattctactaaagtaccaaagatatcagaaatcgcttcatttaaagcccctgattcattttgataaattagatttgaactattttccgtaacagcatgcgttaactcgtgaccaattacatcaattccaccagataatgaagtaaatgttacaccatcaccatctccgtataccatctgtgatccgttccagaatgcattgttataattacttccgtaatgaactgttgattttaacggcgctcctgcatcattaattgaattacgattaaatgtattcttatagtaatcatacgtgatacccgcatagtaatgagcatctaccgctgctgcatcatacgctgcattgaaaacattatctgcatctgcccataatgttcctggtaatgttgaacggtttttcgcatcatatgtgaaaatcgttgccccgcgtgtattatcttgtaagtagtaagatgatccagataacgttgtattaagagacttcgtatctcctagtacgcctttaccagttcctactttattcgttcctgttacaggctttacaacagctttcgcatcctgtttaggagcctcttgcttaactggtgacttatcatcattcgtcacatgatcaattgtattaaacttatttaatactttaccgctgtctgcctcaatgaaatagtagtagtttcctgggcttggatctaagaagtttagatttacaacatatgcatatgttgtttcctcaccgttttgatatacatataagtccgcttttggttctacttcatatttcggtgttacccctaaatcttgctgcgcgatttcaattgcttttgcgccttcaatcttatttttatttttcaacttttcctttttgtctaaatcaggtgcaactgttccagacaatacttttaaagaaccgtccttacttacgtgagctacttgagtagaaccccatacaggcactccttcgtaaacttgttgcatacgtactactgttgaatcagttacagcatctttcttcacttgtttcactttgaaagaatcttgtgcactcttttcccctagcttgtaatcaccttttgctgcgtttaagtaatcaaacacaacagattctgctttcttgccagttgcttcagttagatcaccagaaataaactcaggtgactgcaccgtctcattgtacttcttagtagagagcacatttttagaatccgcaaacgcagagcctgtccctccaaacgttgtaactgccattcctgtcgctaacactaatgctaaactcttctttttcatataaccttccccctaataaaaaattttttgaaaaagagtagtttcatattagcattatgtttccactattaatatactaaaaattcaattaatttatttctcaagttttgtagaattttgaggaacaaatattgaaaaaacccctttccgattggaaaggggttttttcaatattttcttaaccataaatatctggattagagtaatttataaccttttcttctgaaaatttaaaaccgtaaatatctgggttagaatattttatactactttcttttaaagcgtttaatccataaatatctggattagagtaatttactgagccttcttttaaagactttaccccatatatgtctggatttgaataattaacgcctaaagaaagaatcgctactattccaagccctactgcaccataaatgcgctttttcaattcaattcctccttttcttctaaaactttaataacttctttataatatttattactttcctcatacttaaattcattctctaaatacatagctaattctaaataagcattttttaattccttcatactacctacactcttaaaaaacggaatagcctcattctctaaaaatctcttaaattcttgagattctccaaaatatttatacttaaatatacagaatgaataaatcattttattgtatttctcatcactccgtgagcaatcaattcctttttctatccattcctgcgcttcttcataacgtttaagatgaatgtattgcttagccagtccataaattgtttcaatataattcatattgacagtcttctgcaattcgaaactttgaagaaaatagtctttagatttatcatgctcatttttataatggtataattcccccatattatttaaagtcatagctttaatcatatctttttccgcaaaagaatctacttctcttaatatactctcataaatctttagagcttcttcatattgtgctttttcaacataacttaaagcaataatcgtttgacaatttattacataacggaatttatattcgttacggaacccctccatggcaatatgagcaaaatgcatggctaaatgtggtatatttagatgactatacgcaagacttaggttataatatatccccgtttcataatatccttgctctttagccatttcttctgtttcaattaaatattttaaactttccttatgcttatattgcaaactaagtaataatgccttactgtacgtatacaataacttttgaaagggtgagtatttcttgtacactttcttcaatctgtccaattcttcttcaagagcaggtagatctcgcttcatcattaaataacgtgtatacagcagtttataataatttataatttcaaaatccaacacatgcttcatttcaccttgcaactcttcatatatacgttctacttgttgcttgtccaaatgaactagtgcattcaaccattcatccagcttccccttcacatcttcttctacatctctcaaatccgtcacagcaatttctaatcttgcgcagagcaattgtagaatttcttctgatgcttcgatctttccattttcgatcttacttaagtatgagacagaacaaatgccctgacataattcttcttgtgtcattttttgctgaagccgtttgtaaaagacttgtttgcctattttttctaatgtttgttgcattgtcctcctccattctcattaccccattactctaataatacataaaatttggagaaatataaattgataaatataaattttctaaaaaatatgcataatttcatttttttctctcttgacttcacatcaatatctcttctttgctaccaatggtgaaaaattggtatactataaccaaattatggaggtgttctcgcgatgactcattataaagacgatagttatgccttacatacagacctatatcaaatcaacatggcttatacatattggaaagatggtattcataatcgccgttctgtttttgatttatattttcgaaagcttccatttgagaacggttacgctgtttttgctggccttgagaaaattgtagagtacattgaaaatttcagttttactgaaagcgatatcgcttatttagcagaattacaatttgaagaagaattccttcattatttacaaaatatgaaattcactgggacgattcgtagtatgcaagaaggtgaagttgtatttaataacgagcctttattacgtgttgatgcaccacttggtgaagcacaaattattgagactgccctcttaaatattgtgaattaccaaacattaattgcaacaaaagcagcacgtatgaaacatgctgcaagtaatgatgagcttttagagttcggcacaagacgtgcccatgagttcgatgctgccctttgggggacgcgtgctgcctttattggtggtttctcctctacaagcaacgttcgtgctgggaaacgctttgggatccctgtagctggcacacacgctcactctttcgttcaagcatatcgcgatgaatacgtcgcgtttaaaaaatacgctgaaactcataaaaagtgcgtctttctcgttgatacatatgacacattgaaatctggtgttccaaatgcaattcgtgttgcaaaagaatttggggatcgtattgatttctatggcatacgtcttgatagtggtgatatggcttatttatcgaaaaaggcacgaaaactattagatgaagcagggtttacaaatacaaaaattatcgcttctagcgatttagatgaatacacaattatgcaccttaaatctcaaggagcaaaaattgacgtatggggcgttgggacaaaattaattacgtcctttgagcaacctgcattgggggctgtttacaaactagttgcgattgaagatactgacggaaaattaaatgatacgattaaaatttcatctaaccctgaaaaaattaccactccaggactgaaacgaatttatcgtattatcaatcgggtaaatgatcatgcagaaggcgattatattgcattagattctgaagaacctggaaaagaagagcgcttaaaaatgttccatccagttcacacatatataagtaaattcgtaacaaactttgaagcccgtgaactgcataaagatattttcgttaacggtgaaagaacatatgaactaccaagtatattagatattcaaaaatataatgaacagagtctctctctattttgggaagaatatatgcgaactttaaatcctgaagaataccctgtcgatttaagccaagagtgctgggatcataaaatgaattacattcaaacagttcgagaacaagtcgaaaaaaacatacaaaagtaaacagagaagtttccccttctctgttttttcaatactatatggatatttgtaaaaaatatattaaaagaataagacgaatgtattttatttgtaaattttaatataacgctatttaaaagtaaaataatatttggtattattttattgagtcaatttcaacaaaatcaccaataaaaaagaggacgcgggtcgcgtcctcttttttataaatctttcactcttaatacacgcattgcatttaacactgcaagtagtgtcacaccaacatctgagaaaacagcttcccacattgttgcaataccaaaagcaccaagtaataaaacgatcccttttacacctagagcaaagatgatattttgccacactatacttcttgtacgttttgcaatttttacagctgtcgcaatttttgaaggctcatcagtcataataacgatgtctgccgcttcaattgctgcatctgatcctaaaccacccatcgcaataccaacgtctgcacgggctaatactggtgtatcgttaataccgtcaccaacgaaggcaattttttcttttccgtgcttcgctgcatcaattttttcaatctcttctactttttgttgcggtagtaattccgcatgaacttcatctaagcctaattctttaccgacagcttcaccaactggttttgcatcaccagttaacattactgtctttttaatacctagttcttttaacttttgaatcgcttgtttcgaatcctcttttacctcatcagagataacaatataacctgcatatcttccatctacagcaacgtgaactaatgtacctactgtttctggttgcttaaattcaatattttcttttctcattaattttgcattacctgcaaaaatttcttttccttgtacttttacgactgtaccgtgaccagaaatttcgttataatcatcgattattttttcatcaattgattttccatatgcctttcgaatagattgggcaattggatggttagaatatacttcagcaaatgccgcatactctaataactcttcacttgtagtaccttcgctcggttccatttttgtaactttgaaaacaccttttgttaatgttcctgttttgtcaaaaacaatatattttacatcatttaaagcttctaaatagttactaccttttactaacacaccacttttagatgcaccaccaatacctccaaagaatccaagaggaatggatacaactaacgcacatggacaagagattactaagaacactaaagctctataaatccactcagagaatgtagctccttctaaaataagtggtggaataaacgccatgatcgccgctgtaataactacaactggagtgtagtaacgtgcaaacttcgtaataaagttttccgttggtgcttttttactgcttgcattttgaactaaatctaaaattttcgatacagtggattcaccgaattcttttgtaacttcaattgtcaacacaccgttttggttcacaaagccacttaatacatcatttccaacttcaacttcacgtggtacagattcacctgttaatgctgaagtatctaccattgatgttccttcaattacttttccgtctaacggcaccttctcacctggcttaacgataatataatcgccaatttgtacatcttctggtgatacttgtttcgtttcatttccaacctttacattcgcataatcaggacgaatatccattaatgaagtaattgattttcgggagcggtttaccgcaatactttggaatagttctcctacttgataaaatagcattactgctacagcttcagaatattgttgaattgcaaaagctcctacagttgcaattgccattaagaagttttcatcaaatacttggccacgagttatgtttcttatcgctctccaaacgatatctccacctattaataaataagcaaggacaaataacggaattgttaccatttgtggtaagcccgctaatgcagcaattgctgtcaaaattccgccgaccactaatctccctaccatctttttcacatttgcttcaccatgatcgtgactatgtccgtggtcatgaccgttcttctcttcacgaacaactttcacatctggttctaacttttgaacgacatttgttatatttgctacagtcgcttctagttctcttttattcgcaacttctactcgtaatttcttcgatacgaaatcaacagttgcttctgagacagctggcatttccttcactttattttcaattttcattgcacagttcgcgcgatctaaaccttctaatataaatacttctttagcaattttatttttttgttcttcttgaactttaatatgcggttctaattttgtaacgagttgttttgcttccgtaacaacttcgttttctttattttgtgctgtttctaagatcattgtctttgttgcgaagtttacagagcaagaatttactccttctatattcccaacacctttttcaattttcattgcacagttcgcacaatctaaaccttctaacatcagtttctttttcaccaatgcttcagccatcgttctccctcctcgcgttcttttattcttcttcgtttacgtgttcaaacgcttgctcgaagatatgaattacgtgctggtcagctaacgaataataaacaacctttccttctttacgattcttcacaagtttcgcttgctttaacacacgaagctgatgcgaaatagatgattgtgtcattcctaataaataagctaaatcacaaacgcacatttcagcttcaaatagcgcatgtaatattctcgtacgtgtacggtcacctaatactttaaatagttctgctactttacttaaactttcatcagttggaattgtttgttttacttgctctacaacttcttcatgaattatcgtttgagaacatgtctcttgtggtgtttctactttatttccagccattatagctcacctctttaattgaacatatgaacaatcattcatatatcttatactcttattatatgagcgcccactcatatgtgtcaatgaaatctgaattttttttatgaacattccgttcacattttaataagtcgtatacatatttttcgcactctctatattctcatacaaaaaaggatgcacaattcgcacccccctttttacttacttttcatttttcaccgcatccacaattaaagaaacaaatcctaaatgattatcccgatttctatggtcaaaacgtttcgaacgataaataaatccatctttctcattccaatcattatagtgaaacttaccattctcatcacagtattctaagagccttacttgaaaacctgctgattcaaacatggacgtgattgttttatagctatgaacaattttatgacttgctgcaggatgatctaatggaccaggtccacctacttgtaccccttgctgatattcttcatctggaaaaaatgcatctggtactgcacaacgaatatatccattctccattaaaaactcataacaaatttttgcagcttcaattccttcttcatatgataaatgctcccatacatgttctgccaaaattactgataaagaattaggttgaaatttatcaagccaagcttctctccgtaataaatttaattcttcttcattcgtatgtaaccaaccagggttattattataaccctctgctccaacaacaacttttgcttcttccatttcgctcccacccttttttcatattccgacagaaaaattcgacaaaataatatacattccctttatttcaacaaaagaaaaagccttgcgcgctccctagacgcacaaggcttactgtgtttatatccctttaattagcttgttctaaattatcctgcgaacttccatcgtcttttaaatgactatgttttttcgaataaacaaagtatacaactactccgattgctaaccaagcaccgaagtacatccatgtttttaatggtaggtttaccattaagaatagacaacatgcaattgaaataatcggcaagatcggtacaagtggtaccataaatccacgttgtaattttggatgtgttttacgaagaataataactgacacaccaaccatcgcaaatgttaacaacgctccaatattcgctaaattcgacaattctttcaaatcgataaatccagcaattaaagcactaccaattcctgttaaccaaactgtaaatgttggtgcttctgtctttttattaattttcgcgaaagattctggcaataaaccgtcacggctcatagcgaagaatacacgtgtcgttgcataaatgtaagcaaaaattactgccataataccaattacagctccaattgcgattataccagctactttatcttgtcctacaacttctaacacatacgccatcgcttccggtacatctagctctttatatgaaaccatacccgtcataacgagacaaactacaacataaatgattgtacaaatgactaacgaagcgataataccaatcggtagatcacgttgcggattttttacttcttcagcagaagttgctaatgcatcaaatcctaagaaagcaaagaatactgctgctccccccgcgaaaactccacttaaaccatacggtgcaaatggtatccagttttctggtttcacgtagaatacaccaactgcaatgaataaaacaacgataccaattttaattaataccattatgttattcactcgtttactttctttcgtacctcttgataataaccaagttataactaatgtaacgataactgctggtaaattcactataccaccttgagacggaatcgttagcagtgcttttggaatttcaagccctaatccactcactaagttatggaagtaaccagtccatccgccagctactgcggcagtcgttacaacatatacggatagtaatgtccatcccattaaatgagctacaaactcaccaattgttgcatatgagtatgtgtacacactacctgaaacaggaagtgtagaagcaacctctgcgtaacataatgctgcaaatccacaaacgatggctgcaatcatgaatgaaaaaataactgctggaccagcatctcttgctgctactaatccagttaatactagaactcctgtaccaattatcgcaccaatccctagcattgttaggtcaaatgcccctagcgttttcgtcaaagttttacttttactttcccctaacaattgcgtaacggatttctttttaaataggttggccacgatgtatgcccccttttgccaagaagagctaagagatcttcactcttagcccttatcatgttgttttatatattgttcgattttgttttgtataatgcttctattagcaagatactgtttctgcttctaataattctttagcacctttgtactctacaccgtgagcttctgcaactgcttcgaatgttacatagccatctaatgtgttaataccttttagtaatgcagtgttacctaggcaagcttctttgtagcctttgttagcaatttgtactgcatatggtactgttacgtttgttaatgcaagagttgatgtacgtggaaccgcacctggcatgtttgcaactgcataatgaacaacgccgtgtttttcataagttgggttatcatgagttgtaatacgatcagttgtttcgaaaataccaccttggtcaatcgcgatatctacaacaacagaacctggttccattgatttaatcatttcttctgttacaagttttggagcttttgcacctgggattaatactgcaccgattacaagatcagactctttaacagcttctgcaatattgtaaggattagacattaaagtttttacttggtttccgaaaatgtcatctaattgacgaagacgttctgcacttaagtcgatgattgttacatccgcacctagtccaactgcaattttagcagcatttgtaccagcttgtccaccaccgatgattgttactttaccacgtttaacccctggaacacctgcaagtaagatacctttaccgcctttatttttctcaaggaattgtgcaccaatttgcgcagccatacgaccagctacttcactcataggtgcaagtaatggtaatgaacggttttctaattgtactgtttcatatgcgatagaaacaacttttttctcgattaaagcttttgttaattctggctctggagctaagtgtaagtatgtgaataagattaagccttcactgaagtgtttgtattcgctttcaattggttccttaactttcataaccatttccatgttccaagcttcttcagctgtatcaacaatttttgctcccgcttccacatactgagcgtctgtgaaaccagaccctaaacctgcacccttttgaatgaatacttcgtgattgttacgaattaaatgtacaacacctgctggtgtcattgccacacggttttcgttgtttttaatttctgctggtaccccaatacgcataatgaaatgcccccttataattaacagaaaaaagagattcttttttctttttgtaataattaataacttatgtccttattctagcataacttaaaagttatgaaaacgctaacataccattttactaaagtttttatatttagaatagtgtaaatatataaaacattgattctattaggtgtttcgtgtcatttcattatctttcactctatttttattatactgcttcaaaataaacagcaatcatttattatttgacaataatgtaacaatgtaagaaacctaagcgataacgtatacatatacagttattactttactcaatactttagagatatattcttttcacaaaaaaacagctactagcatttagccagcagctgggtaacttataaataacttagaaaataaatcatctgtcgtttcagtaattttatcaaacagatcactttcttccgcttcttgctcttttaacatcttaattgtttcacgtgcatcttcagggtaatcggttatgataccatctacgttcaacttataatatgcctttaaattttccatatcatttactgtccatacgtaaattggtttgtttaacttccttgcttcttttactaatttcttatttaacatatattcttctgctacgtaaaagtcagccttcacattctttaagttagctctacttgcatacaatatataccctacttttatatctggatttgcacgcttaaactctttaataagtggatagtgtaacgtttgaattacacattgcttctcaaattcattatctttaatcgtttttaagactttgtttacaaaatctttttcgcccccatgaagcttcacttctatattaagtttgattttgccatttgctagcttaatgatttcatcaagtgtacttatttgtcctgaaagtccatcttgactaagggtaagttgccttaactccgccatcgttaaatctgacacatgcacattggcatttgcgagacgtttcagcttcaaatcatgtataaccgctagttcaccgtctttcgtttgtaatacatctatttcagcgtagtctgcttttgcatcaatcgcaccttgcacagcttctttcgtattttctacgccttttgatatatacccgcggtgcgccataataatcggttctttatacgaatttgaaataaacgttacaatgaaggcaacgaccattccggcagtaataattcctacaatgtatacgccaatgaatttccaacgatgtttttggaaaaaacatttatctgctttcgttttcgaataatctaatccttcttctaataaaacatcctcaaccggtaccttttgtaagtataatcgcgtaatcgccataatataaaatggcgtcacgataaagctgaataaatacaatgtgctcgttaaaaatacagaaatcgttgattcagctaataatgcaaatgttcctttcgggtttgtaaattcataaacaccccataggcacaataaatatattcccaaaaacacgacatatacaattccaattgaaataaaaaaccctactaaaaagaatagtactttaaaaaagctttcctttactaaagttgcacttttacgtgctgccacgcgaaatggtttttgctctaaaacaacaataggtagaacgaaaatccatcgaagattcaaatacgcgactacagcaaagaacgtgtaataaccaacttgtcccatcgttgtcttaaacagttctcctgtaataaagttaggaatttgaatttgcgggattaatgccgtttcatatcccatatttaaaagaggcaacaatacgacagcatataaaataaatcctggtaagcaatatgtaaaaagagtaggtaaatacgttaccgttttatataaaatcggacgtaatttcaccttctgtcttttatgagcgaaatacgaaataataataagcaccgcaaattctgtaaagataagaaacagtgctaacaatgataaaattacgattgctaagatcccataaggcgtctttaaaaacgctaataattcatcatttgtcgcatttgcataaccaccaaaatacaataacttattaaaaatgattccaaatagtggaacaaacacaatcgctgctaataatttataagcaagttgaaaagttaatacattccaaaaagcaaatttaactgtttgaaaggaatgtcctattactcctggtatagatagttttttacggtgttgcatatattcctccacattctaaaacgatatttgagatggattccatatttccagttctaatccatctttttaataataatatattccgcttaacatgaacactcttatacatataatgaaaaaagtgatggctacttcccatcactttttcatttattctattttttctctagcccttgtccaaatgctttcaagaagctaaaaccgaatgtaatagctctattgatatctggatcttttaatactttaaagaaatccatcacttttgtttttttaccactatttaattcatctgttgcaaattgcaatcctgtaactaaactggacgtaatttgcttcgttatttctgggtcaactgaagataacgcttctcctgcccccatcatattgttgagtgcatttttaactggttcacgatttaattgctccacagcgatttttgaaacatcttccttcgcagcaagtaaactaatcgctgcatctaatatgccagccttctgcaactgtgctaaaagctgcatcgtttcttctactgcttcacgattattagatagctcatttagaagttcatctgctaattgctgtttctgttcttcctctgttacaactttctttttaattatagtaatttctttcgccactatctccgccccctagtccacaagtgatacgtattgttttctttgccatttttgctggatttcaacaccattttgcggattacgctttttatctctcgggtttgaagatggtaacggacgattccctttttcacgtagtacacgcatctttaccatcgtttgtttgtacgctggtgtacacgtataaagatctgtcgccgttccagttaaaatattgattgcctcttcatttaccgttgcatgcatcggtaaatatagctctttccccgttacacgatctgtaacaagtgcctgtactttaattttcccaaatggtgatgctaattctacaaggccaccatctttcacattgcgctctagggcaagttcaggcgagatttcaacgaacacttcagatactttagataaaataccagccgatttattcgtcatattcccttcatggaaatgttctaacatacgaccattatttaaaagtaaatcatactcatctggtgctacaactggtggtacccattcatctaatgatagacgagctagtttatctgggaagttaaatccgtccacatataatagcggtgtatcgctaccatcatggctaccccaacataaactattccatccttctaaacgatcgtatgttgcctgagaatataaaggtgcaagcgatgcaatttcatccatgatttcacttggattttcataattccagtccccgccaagtgcacgagctactttttgtaaaatccaccagtctggctttgaatcaccaagcggcttcaatacttcatataatctttgaatacggcgctctgtattcgtaaatgttccctctttttctaagcttggtgctgccggtaaaataacatcagcaaaacgagctgttttcgataagaacatatcttgaacaacaaggaaatctaaattcgctaaaatatgttgtacatggttggcattcgaatctactaaagccatttcttcacccataacatacataccacgcagttttccttcatctgccgcaagtaacattgcaatattatttaaacctggtgctttcggaattgtagtaccgtatgctttttcaaatttcgcacggagcgcatcatctgaaaccgcttggtaacctggaagccagtttggtaatgttgccatatcacaagcgccttgtacgttattatgtccgcgtaatggatatgctcctgcaccaggacgacgatagttacccgtaacaagcaatagatttgaaattgctgctgaagttgtacttcctccagtattttgagttacacccattccccaaagtacacaagtaccatctgcttcatataccatacgagccatttctttcagattttctttcgaaatccccgtaatttcttctgtataatcaagcgtatacttttctaccattttgctatattcatcaaaattcttcacattttcagctatgaactttttatcgtgccaatcttgatcaataatatatttcgtaataccagcgagccatacgtaatcagttccttggcgcggatgaatgaataaatccgcacgctctgccatttcatgtttacgaaggtctgccacaattaatttttggtcatgtaatttatgagcacgttttacacgcgttgcaagtacaggatgtccttctgttggatttgctccaacgataatgacaaggcctgcttccgcaatatctttcactgttccagcgtccccgcccataccgacagttttaaataaaccgtctgttgctggagattgacaataacgggaacaattgtctacattattcgttccatatatttgacgggctagtttttgcataagataattttcttcattcgttactttcgaagaagaaataaatccaaatgcatcacttccatattctgatttaatatgctgcatattggatgcaacaacttccagagcctcttcccatgaagcttcaacaaacgtatctccttggcgaattaatggctttgtaatacgatcttcactgtttacaaaatcccatccaaatttgccttttacacatgtggaaataccgttaaccggcgcatctgaaacaggctgcactttcaaaatgtggcggtctttcgtccatacttcaaatgaacaacctacaccacaaaatgtacaaactgtttttgttttattcactttcgtcttacgcatcgcagcctctacttctgaaactgctaaaatactactatatcccggctctacatcctttacaaaatcaatcatcggatctaacacatccggtttcaatcctgtcatgaatccagcttcacccagcattgttttttccattaacgcattacatggacatactgttacacactgcccacaacttacacaagatgagtcatttatacttacaccattgtcccatataacacgtggacggtctaagctccaatcaatcgatatagtttcattcacttgtaagttttgacatacttctacacactgcccacaagcaatacattgatttggatcatatcgataaaatggatgtgacatatccacttcacacgcacttacttttggctcatacggatatttctgttcctcaattcccatcatatgtactgtattatggactttacagttaccattattgttatcacaaacggtacaatacaatagatgattttctaatattcgatccattgcctcagtctgtgcctcttttgcacgctgggactgtctttcgatatgcataccgttctctaatttcgttgaacaagcacgcaataactttccatttacttctacaatacacgtatcacaagtttgaattggatctacttctggtacatgacaaatttgaggatgttccaaattactctcgttaaataattgtagtatcgtcttttcacctgatgcagaaaattctttaccatcgacggttacacggactgtctgttctgccatagtttcccctctccttacaaccaactgtacaacacaattatgaatccgttttcaaaatcgcattactgtacatatttttgaaacgctctacccaaatactttcttatgaagtcgattctagatgttataaggtataactacgaaagcttgaaaatatcactattctacagttctattatatcgtacatatacaataataaccaaaataatctgtgatcttctttttaataggtgtttttattttttccattgttttatgataaatgtgggagagaaatacatataaaaggggaattaaatatggggcctacgcaagagacttatacaattgtacgttatcaatctggtacattttcaaaacaacttgatgagattgttacagaatctcctattactattaaattgaatggtgaagaatatgtaacagtcgtatgcacaccaaattatattgaagatatggtaattggttttttaatttctgaggggattatttcttcctataaagatgttgaagaactatgggttcaaaaagataacggaattgtccatgtaaaatcatcaaaagtgaatccgctctatcaaactttatataataaacgatacatcacttcttgctgcggaaaaggtagacaaggttttattttcgtaaacgacgcagcaaaagcaaaagacttacatgatatacatgtaaaaattactcctgaagaatgctttcatttaatgaataccttgcaacaatcttctactacatttcgccaaactggcggtgttcacaataccgcgctatgtgatcgaaacaatatcctcctatcaagaatggatattggaagacataatgcattagataaaatatatggtcattgtttgcgtaacgatatatccattaaaggaaaaatcatcgcatttagcggacgtatttcatccgaaattttactcaaagtttcaaaaatcggatgtgaaattgttctatctaaatccgctccaacaaaactggcattgcaacttgcccatgatttaggcattacagtcgtagggtttattagaaatgaatcttgtaatatttacacacatccaaaacgaattgatggctatcaatccaatgtttaaaaaataactcctcaatcgaggagttattttagttataaaaatgtaacatattaaacacttgaatagttaacaaagttaatatataatttcattacataattaaaacaaaacattgtagcatatatcttttcattcttttacaaattaaaagagaatactaacaaaacatatactcaatcttataaaagtaatggatttatttgaaatccaccagggaggttacaactatggaaattcgcttattaacaacagaggacgcagaaatatatttaaaagtttgtatggaaggtttaacgaagaatccggaagcttttagctcttcttatgaagatgttcttaaacatgaaaatcctgtggctgctatggctaaacgattaagcaatccggataagtatactctaggtgtcttcaaagataatgatttaattggtatcgctactttagaaacaaaaccatttattaaacaagaacataaagcaaaaatcggttccgtttttgtttctccaaaagcgcgtggccttggagcaggacgagctctaattaaagcaattattgaaaatgccgataaattacatgtagaacaacttatgctcgatgttgtagttggtaacgatgcagcaaaaaaattatatgagtcattaggtttccaaacttacggcgtacaagagcgttcattaaaacataacggtcaatattgggacgaggaacatatggttctgttcttaaatgattaatacttcaatataaagtgaaactttactcagtgggtgatttttccatcctccactgagtattagctgaatcaatcgggcttttacgggcagttatcgcccacctaactccctcgcattcgctgaattttaagatgggagttactgcccacaaatagcggggtagttttccaaaaacatctttcttaataagaaagatgtttttttgcattacaacaatgtaatcttcatgtcacctttatcgatcgtaccaatccttaccatttattatactaaaaatataaagtgaaactttactcagtggggaactacatcccacgctgatcgcatgtacttgatatatagaggagaatgtgacatgaaacaaaacaaacgagctatgcttttaatatttactacagcaattgtaacttctgggttagcaattttaccttggtttatcatataggaatactcccctaacaatgaaaaaagctgattgcttcttaagaagcaatcagcttttttattttataaaatccctaaaattttatttacacaacttataataataaccatagatacggcaacacacatgacaaccgtattacgatcttgcttttctttttttgaaatttcttcttttggattcatgtgtatgatctccttttaaaaaaagtgtgagataggaaatttttcttatccgatgcgaggtgaatacgaaaaccctctctatctcacatacacaatagaatggaattgtcattttataaataaaatgacatgacgttatgtcgcaacatagggtattttgtgtcgctacgttttttattataaaaaatagttgtgcaaaactagtgcattttttatgtcaattactccgagcgaaaaaatcatccctccattcaatcacataaaaagagttttttattattttcatgtaaactatacaagtagaatgaacagtttggggtgcacaagattatggtaaaaattttattagtagacgatgaagaacgtatgttacgattattagatctattcttaagccctcgcggctatttttgtatgaaagctacctctggccttgaagcactaaaattaatcgaacaaaaagaattcgatattattttattagatgttatgatgccgaatatggatggatgggatacttgctatcaaattcgtcaaatttctaacgttcctatcattatgttaacagctcgcaaccaaaactacgatatggtgaaaggcctcacgatgggcgcagatgattatattacaaaaccatttgatgagcatgtattagtcgcacgaatcgaggctatattacgccgtacaaaaaaagatggctttgttagtttcaatggtattgagtgggataaaacgaaacataccgtcacagtgtacgatgaaaaaatctcgctaactcctatcgaattttcgttactcggactatttttgcaaaatacaaaccgtgcttatagccgagatgatttaatcgaaaaaatttggggctatgaaacagatatcgaatatagaacaattgattcacacattcgtaatatccgtgataaactacgcaaaaaaggatttccgattgaagattacctagaaacggtctataaagtcggatataaatggaaaagtgaataattacttcggtcagtgggaaatcgtataccactgactctttattatgaataaggtatggtgagaaaatgagtaaactttcccttaaaattgggacatactttttaatattagctttatgtattgaaacaattgctttcgtatctttttataaaagcctttcaacaatgcgtgtgaaagaagaaaccgatgctctattagagaaaggtaatcggtatcgtgataagattgtaaaccgtgcaagatggaatgatcattctaaacaacagcaatacacagaacgtcctaaacaccctcggtatcaggatttcactatcgagcatgcggctgaagatttaatcggttccgaattaattgctaatactgatatcacaatcattataactgacaataacggcaaaattatttctaactcagaacccataacgaaagaaatgcaaaaacaacttatttgtaaaacaaaatctattccaaaaagcgggttaattgtagaaagaaactggaaaaaatcaaaattcatctcaacagtaagtccacttgaaattcaaggatttcaaggtaatttacatatgttattaaaaacatctttcttagaaaagatgttacttaaactcctgcatcaatttcttatcattagtattttgacgattattttaacaactatttctgtctttgttttttctaaatttattacagatcctcttataaaaatgaagagagcgacagaaaaaatgtcaaaattaaacaagccaattcaattaggtattaaacgaaatgatgaactcggaagtttagcaaaaacaattgaagatttatcgagtgagcttacgtatatgaaaaaagagcgcaatgaatttctcgctagtgtcgctcatgaactattaactccattgacctatatgaaaggttatgcaaaggtagcaaagagagactctttaacaaaagaggagcgagaagaatacttacaaatcattgaggatgaaacggatagtgtaaccgatctcgtccaagatttatttatgcttgtacaattagaacaacaccaatttgttataaaaaaacaaaaagtgcttcttcagccatttttagaacgaatggttgaaaaaacaaaaacaacattaacgaataagcaaatgcaacttcatgtatattgcaaagatgatttagaagtttgtatagacgaaagacgtatggaacaagttatgttaaatttattacacaacgcttatcaacattcgccagaaaacacatccattacgatacgtgtactcatggaaacatattcttttacaataagtgtacaagatgaaggtgaaggtattcctgaagaagatatcccgcatatttttgaccgtttttatcgtgttgataaatccagaacacgagctacaggcggaaaaggcatcgggctagctgttgcaaaggaaattgtagaattgcataacggttctattctagtaacaagccaattagaagcgggaacaaactttataatcgagctaccttttgaataatatgcgtgtgaaaacaccagtagtagtaaacactactggtgttattttgttcataaaaacagctcatataagctaagcttttgaaattattcttatttcaatataaaataaaggtacatttgcaaagatttggagggtgatataattggatatccatgtattaacaaaagacgaagcagaaatttacttagaacttcgcgtagaaggattaaagcaaaaccctgaagcattcagctcttcttatgaagatattattaataaagagtgtgcgattgaatataaagcacaaaaattagcacaagatgaaaactatacgctaggtgcatttaaagatggaaaattaatcggggttgcaacgctggaaacgaaaccatatgtaaaacaagaacataaagctaaaatcggttctgtatatgtatctccaaaagcacgcggacttggagcaggaaaagcacttattaaagaatgtcttgaacttgctaaatctttagaagtagaacaagttatgcttgatgttgttgttggcaacgatggagcgaaaaaactttatgaatcattaggttttaaaacattcggtgtacaagaacgttcattaaaatataacggacaatattgggacgaagagcatatggtcttattcttagatgaaaataaataataaaaaacatcctcatgtttggaggatgttttttactttcttgtaaaccatgccgtgtgtaataattgaatcgctttcgcaatctcttcctctgataatatcgcaaacccaagtaaaactacactctcaggcgccgtaccgtctttatagtacgtagacacaggatatattttgatactatatttcgcagcttcttgaattaattcttcttcccgcattccattatgcacttttaataaaatgtgtaatcccgaatcttctcctatcactttaacacgattagagaaatacttctctatttcaaaaacaagtcgatctctcttctttcggtagacgacacgcattttatgaatatgtttttcccaatagccttcatttaaaaatcttctaatcacttcttggtccattcttgaaacactttgtgtgtaaaataaatattgctgttgatactttttaattaatttcttcggcaacaccatataactcatccgtagcgatggcaataatgctttagatagcgtccccatataaataactttcccctctgtatctaacccttgcagcgccggtataggctttccagaatagcgaaattcactatcataatcatcttcaataatatacctgctctcttctttctttgcccattgtaaaagctgcatccttctcgtaataggcataatcattccatatggaaactgatgggaaggtgtaacaaatacaacattcgcattgctattttctaaatctgcaatacaaattccatctctatctaaagataacatttggactcttgcttctccctgttcaaaaacaaccatctttctatgataccctgggttttcaactgcataattgcttccctttaacaattgaaacaatagtttcactaatatttgtgttcccgctcctaatacaatttgactagctgaacaacgcacacctctagattcatacaaataattcgtaatctcttctcttaagcttgcttccccttgagggtgtcctagaaagagaagttcgttattatgcggctgccatacttcatttacaattttccgatacatattaaatggaaaagcatttgtatcaattcctgtttgtgtaaagtcaaatttataacgcttctcctgaaacgggacttcttctatcctctcttcgctatcctctacatgaaccatttgctcaatcttgcatacaaaataaccttttctcgatatcgactcaatataaccttctgcaagtaattgttcgtacgctgcctctactgtatttttacttacttgtaaatgtatcgctaactttcgcttagccggtaatttcgtaaaagggacaattgatccatctttaatctctttttttatatactcatacaattgcacatataatgcctttttactattcatatttaaattaggcgttaattctaacatagtatctgaccccttaataaaactaaaatctgatactttttacagtaccagattatatatataattccttttatcatgtcacacatcaaaaatcaaatactggagaggagaaacatgataatgaacaacggtagacgtatcggacttattatgattattacaggggctacattatggggattatctggtccaatgattcagtggctatttcagcatactaatgtatcctcaattgattttttaacaattcgattgttgcttgcaggaatatttattttgtctttcttacttataaagaaacaaaacatatttcaaatttggaaacaccttagatattctatacaacttattattttttctattctcggcatgctcggtgcacaatacgcctttatcgaaacggttcatattagtaacgcggtcactgcaacgctatttcaatttctaggtcctgttcttattaccgtgtatgttgcatttgaacaaagaaaattccctgcttccatgcaactattcgcaattatagccgcgctaataggaacatactttattattacaaatggctcaattgaaaatattgttttatctaaagaagctattatttttggactattaacagcaatcggatttgcattttatacccttcatccggcttctctcattaaagaatgcgggacaactgtagtaattggttggggaatgttaatcggaggaattgcactacttatttataatcgttcattcgggtggaatcaattttcacaaacccttacactgaaaactttttctatgcttattcttatcattgttagtggtaccctttctttccttctatatatcggtagtcttaaatatttagcagcaacagaaacaagcattttatctagcattgaaccccttgtagctgccatcgtttcaatcacttggctaaatgaagcttttggagcataccaattattaggcggcgtatgtatcgttctgtccgttatttttttgacgatgcctcaaaaagaaaccgaaccaacctatacaacggaacaaatataaaatgaaactttaattagtggggctatctcccactgattattaacctacaccaatcgggctttacgggataaaaaatgtcaaaagaggtcgtacaaaacttacgacctctttttatactttaaaggaattgtcccgccttctagcaaatacaattacactaacaataaaaactaggagtgtggcaccatgaaaaaaatcggaactatgctacttctctccctcctcatcactggatgcacacaaactcaaccggattcaaaagaacaaaaaaaagacgtaatagcaacttcatccactcaagtgaacgcaccttccttctttcaccttagtgttttaaaagatgtaaattgggaagaagccccctcattcatagacggaaaaatacctttaaaaggcatcgaaggaaaaatcgcaatggctgatagtcctattatcgcaaatgaacaaaatgaaataatgtggtactttctagattctgaaatacctactggaaaattgtctattattgcgctaaaacaaggatctgtaactccaacaccagtactctttcaaaaagaaatttccaaacaaacttggactacttcaaatacaatcaattctactacaagcgaactccctctcgctatgtcactaccttcatctggattatggttattaaatatctatgtgaatgaaaaatattatgatcagtttgtaatcaccgctaagtaaagtgacaaaaataaaccactttcttacaacaatgtaatttctacgtcatgtacttcgatagttgaattatctctcttctcttatacttaaagtaagaaatgaagcgaggagagatgagagatgaaaaaaatgatagaagtaatcgtagcagtaactgaggttttagtgaatggtaaacaagttgcaatggaattaaataaatagtgaagaaacataaataattctacacttcttcattattttgatttcttatctcaaaaaagcagtgccttttaggcactgcttttagctattaataacgtggtattttcgtaatttgtgccacgcctgaatcaatagctgctttcgctactgcttccgcaacacttggaacaactcttttatctaatggattcgggattacataattcgcattacgttcttcatcagtaatgatgttagcgatcccatatgctgccgctaatttcatctcttctgtaatatcagttgcgcgcacatctaacgcaccgcggaatattccgggaaacgccaatacattatttacttgattcgcataatccgagcgcccagttcctactacagctgccccagcctctaatgcatcctcagggaagatttctggaattggattcgccattgcaaacacaattgctttctcattcatcgtctgtacaagttctttcgttaatacgttaggagcagatacgccaataaaaatatcagcttggttaatcgcttcttttaacgttccacgcacatgttcacgatttgtcttttttgaaacttcaatttgcgcttcgttcatccatgtttcaccttcacaaacaataccttctaggctaactagcgtaatgtgctttgcaccagcctttaataataattttccaattgcaattcctgccgaacccgcaccgttaataacgattttcacattatccatttgtttgctaacaacttttaatgcattaataacagctgctaaaacgacaatagctgttccatgttgatcatcatggaatacaggaatattcgtttcttcttttaatcgtttttcaatttcaaaacaacgcggtgctgcaatatcttctaaattaatccctgcaaatgtaggctctaaatttttcacaagggtaacgatttcatctacatccgttgtgcctaaacataatgggaaagcatctacattcgcaaacttcttaaacaaaatacttttcccttccataacaggcatagccgctttcggtccaatgtttcctaaaccgagtaccgctgttccatctgagacaactgccaccatattaccacgtgctgtatagtcatacaccgtttcttcatctgccgcaattgctttacaagactccgctacacctggtgtatacgtcaggcttaaatcatccgctgaatttacttctactttacttgtaatttcaatttttcctactaattctttatgcaataacaatgatctttcattaatttgatttgctaacatacttataatctccccttaatttgacaagctagctatatgaatatagctagcttgtttgatcatgaaaacatctttaataatattgtcgctgttacaaccattgccgctccgcctaaacgagtcgaaatttgcgcgaacggcattaattccatacgatttgaagctgataaaatagcaacatctccagttccacctaaaccgctatgacatccagttacaatcgctgattcaactggatacattttcatcactttccctacaagaaaacctgatgctaccattgtaagaacaaccgatgcgcacacaacaacatatcctactgaaagaactgctgctacgtcttttaacggaatatatagcaatcctaatccaaccattaaaggccaagttaaattcttcgaaataaatttatataaatggaatgctccttgctccatttttgctggcattaatttaaagtatttcacaagcgctgctgagaaaatcataatgattgccccaggaataccgatgaacttagaagcaaatcctccgaagatgaagaacgtacacgcaattaataaacctgctcccattaatgagaagtcaattggcttctctgtattttgttcttttaataattctgcttgattgtctgttttcactaatacaccgttaccactaagctccggtttcttctcacctaaacgcttcatataccctgcacttacaattgcgaacatatttccaataatagctgctggaataagctgtgatacaaacgttgctgatgattcatttaaaatatcactataagctagcgacaatggtaaaatcccttccccgataccaccactcacaattggtatgatgataaagaagaatgtgtgcttcatttcaaatccaaataatgaaccgaccaataatcctactgctacagaagctaacgtccctactactaaaggaataaacatacgaacgaaaccttgtactaacactttacggttcattcctaaaatacttccgactactaaacaagaaatatataaatataaaaagttcgattttttcattaacatagtcgcagcttccattgaagctggattcatccagttaaaaaatacaagtaatgatggaataaataacgaaagtattgctggaccaccgatattttttaaaattggaattctcatcccaatatcgcctaagaaaatccccatgatcataataactgcaaatccaccaatcatatctgctggcaatttattatatacagatgccccataaataatagcagccaatactacatataacggtaaaggtataacaccgatttttacattcataattttagaagcgaaagattctctttgtacttcatttccttcagaaaatgataccgcttccacattcttttgaattcccatatggcaccccctcgttttcttaataacaatattaaaacgctttcaatagtaaaaatagtttttgtaagttttgtaattgattttgtaattaaaaaaagtataagcgacttatgttaagtcgcttatacgtaaaactctattttcttttgatcaacacatcttaatttacttacaggtcttcccacatgttggtacatcatttcgttttctaacaccccaatgtcagtcagaaacattacatattttcgaatagaaactcttgaaattccaactaattgtgccatttcatctgttgtaaatactcttccattcagagactcgatcttctgccaaattaattgcaacgtttgcttcgttaacccttttggaagctctttcgtcacagtaggctctcttttttctttttgtaaaattaatgaatctaattccgattgactaattttttgttgttctttcatgaaagtaagtttttctcgatatatagttaatgcctttttaaatcgttcaaatgtaaatggtttaattaaataatctactacgccatattgtaatgctttttttatacttcccatatcatgtacagctgaaatcattataatatcgctttctttttcttggttccggatatacattaaaagctcaaaaccagtctcttcaggcataaaaatatcaagtaatactaaatctactcgtgatttctctaatatttctatcgctgactttactgagttaactgcttgaacaagttcaaatcctcctacttgctctaaataatgcgtatttaacattgctaccatcgggtcatcttctacaattaaaactttaatcatatttgcctctcatccctacctttaggtatttcaatcgttatcgttgttccctttcctactaatgaatgcatatgaatttccccatttattcgctgtatactttcttttacaagatacaaaccataaccgcggttatctccctttgtggaataacctttcgtaaataattcctctatttctttttcttgtataccttttcctgtatcttgcactgtaatagttagtatatccccatgttgtatcttaacttcaactcgcttcttttcacaattcgtaactgcctctaatgcattatcaattaaatttccgacaatcgtaataagttcatgagtaatactttcaacatctatttccggcatgtaagaatcttcacttataattaattttatatttttctctctagcatagctgagcttacctagtaaaaaaccagcaaatactggactttttattcttttcataactccaccaatttcatattgatgctctgataccatgccgcttatatacttctgtaattcttcatactgtttcatatgtgtaagccctaatacgacatgcatcttattcataaactcatgagattgtgcccgtaatgcttctgcatatagtctaataccagttagttcctctgctagttttctaatctctgttttatcacgaaatgttgcaattgcaccaactatttctccttttacatataaaggaactcgatttgtcacaatcgtaattccataaatattttgttcttcgtttaattgtacttctcccgtttgcaatacttcttttatacgtgaatttggcatatacaactcaacatctttaccgataaaatcttcttcaagtccgctttttttaaatagacgtttcgcttcattattaattaacgttactctagcctctttatctacagcaataataccttcctttacagattgtagcatcgtatttctttcttcaagaatttttgctatcctgtgcggctcaagaccgaataaacttttctttatatgtctagctagcaatattgctcctataattccgactaatacacccactccgacaccaatataaataatatgtctactttccttaactctctcttttacattatctgctgaaataccaacagccactgctccaagttgttcacctgtttcagaaaatattggtacaaacactcgcatggaaatacctaaagttccttctgctaacgatacatgttcttttcctttcaatgcaggcccttcatctcccccaataaaatgatgccctattttttgaggatttggatgtgactttcttattccattcatgtccataactacaataaattgaacacctgtgttttgtaatattctatttgtatacgtttggattgcagaggtatctgctttcccaaccaaaccatcgattacaatcgaatcattcgccacaatgtgtgcaattgtttttgctttctctgcttggctatcctccgtcgtccgttctacattatgactaattaatatatctgtcacaagtaaagaaaaaattacaactgtacaaactaacaatgtaatcgttttccataaattccatagtctttttctttttttcatcctgttaatgactcccctaattgctgaatagaaaaataagtaaggtgatattattttcaccttacttatctgctgttattatactttaaatttactagtcatcgcttgtagttcttctgccatctcagctaagttttgcgaagctgaactaatttcctccatggaattaacctgttcttctgttgaagctgcaacactttgcatactagctgtattttcttctgcagcagctgcaatttcatcaatagcatttgtcacttcatttgcatctccagcaattctcttcgttgtttctaccatttgattaacttgagaaacaatatgtgtagtagaacttaaaatttccgtaaaacttactttcgtttttgttacaacatcaaggccttgttgaacttctccattcacattatccatcgccttaacagtatgttcaatatccgccttaatttctgcaattaaatttgcaatctctccagatgactctcctgattgctctgctaattttctaacctcatctgctacaatagcaaatcctcgtccctgttcacctgctcttgctgcttcaatagccgcatttaaagctaataagtttgtttgagttgcaatgttttgaattgcttcagaaatagctcctacttgctttgatttctcatcaagaagtttaataatagcatctgactcggataccgacctagaaatagactgcatttgttttgcggtttgttcaactaaatcttctccctcttcagctctttcacgggcatgtaatgaggaaatagaaattgactctgcgcttccagttacatcttgaattgctgtatttacttgttgtaatgtagccgcaccttcttcaacaccttgactttgtgactcagccccacctgatacttgttccatcgcaattgtaatttgatctgtcgcatcatttgcttgctgtacgctcgctgttaactcttcagccgatgctgcaacatgttctgctgaaaagctaatttgggtaataacatcttgtaaagacatagacatttcattaaatgaattccctaatttccctatgtcatccttggaatggattgtaattttctctgttaaatctcccttactaattttatatgccgattcagctatttttcgtaatggccctgtaatagactttgtaatgaaataaattaatatactaccaaatgcaatagcaatagcaatgacaatcaaagtcttataaaacactggattggcagcttggttaatttcttcatcgaacataacaccaactactttccagcctgttttctcatttgttgcaaagattaaattctttttatcatcttgttctgtataagacacatttccttgtttttcttcataaattggtttaatccaaggatcagtaacttttgcacctggttttctagatggatgactaacaatttgcttattttgatctaaaataactgcataacctttttcaccaatattaatcattttggaaatttttaagatgttatctaaatttaagttaattcctataacacctttaccatcttttacttctttagcaattgtcactaccatatttttggtagatgctgattgatatggtgaagtaacaattactttccctttattttcatgtgcttctttataccaagatctatctcttggattgtatccatcagccatttggataaatggttctcttataaactttcccgtctctgttccaatataaataccttctacttctggatgaagttttatatattgcgctagcttcgttcttactatttcttcctgtccatttagatatgtatcttctgttaagatgtctgcaaagtacgtcgcatcaacaaatttctcttctatattttgagaaataacagtatttaaaatcgaaatattctcctttgctttagctgtcatttgatgttcaaaatttgttttggcagtttgatatgaaacaccaccaataataattcctggtatagttaaaataataaagaatgaaatgattaattttttattgatactcatacatttaacccagttaaatattttttgcataataagcctcctttatgtaatgtggatacttgtgtcattttatacaattaacatgcataaaacaatatataatgataacatgtgaatttttcgtcaattatgcatttttgcatatccactccttatacgtattttaatcataaaaataagagaactttagcattatatatgctaaagttctcttatttcttaacagcttctactctataaaacttctcttataatccttaaatctttacccttcgccttatagtcatattactaaaactcttcgtcctaatttatttgacgctctttacataactaattgcctgacttcccatttgtacccatgcctgttcaaaggtttctctcggtacttttacatctaagctatcctcaagtggatctcgaatatatacaaattcctgatcatatccaataagtacaacacaatgttcattatacgtaatagaaacatctccactatttgtttcccatgtagtaaattcagctgcatctaatggtgcaaatgttgcatttgtgatcatgactacaggttgccctgcttttatcctcttataaatttcttctatattcttccctgttaagtctacagctttattaggtaaatatttttccgctaactgaaaaagtggcccatgatatacaccatatcccgattcagaaaatgtataaatattacctacaaatccttcatttggattcccgcgcacaccatcgtctataaaatcaactttttttatttcatttgctaatgtcatcttatccactgaaacaccagcgtattgtaacatcatcgctaagcttgtcacttcacagcctctatctagctctggtagttgctgaattaatggtacacttgataaaatgaccttttcatcattattactaaattccggttctttcccgttttgtatattgaagaatgtccacttctccccatactttgtaattccatttgtatatacactccataccgctatagctagtaatgctatacatatataccacttaaacctccgtatcactctcacgccctttttagttcgttaaataagaataaaatgcgtcagcatccgttcgaatcactggtacaaaatttagttctttttctctctcaggttgatctttttttattttttctgttagctcttgaatattcatgttcgctttatccatattaagctcatctgccaattgtagcaccttttgttcattaatttctcttaatacttgatatatatctttcccatataaatcaatatgatatttttttgcttcttcctgcactttttgttcgtacacctcttgtgctaacacttctatctcttttccttttggtgaaatacctaacttccctgcttcctctcttaccttcgttccatagatttcttctgcaatgtcctctatttcttttccatttgtcgaaatacctaatttatccgcttcatcattaattttaatcgtattaatttgattaattaaatttacaattgatgtattttctatagatatgcctagttttaacgcttcttgctttacttttgtttcatagatttcttctgacagcgtcccaacatcttttccttcaatcgaaattcctagctgcttcgcttctcttcctacttctgtctcatgaatttctttttctaacgtaatttgttctttcccttccgtttcaatacctagattctctgccttttcttctgtatgcacagcatgtatctttccattatttaattgttctttactacgttgtgtgtaatctgtctttccttttgatgtttcagaaggagaggcaccccctaatatacttaagctcattactccaatagtgaataccgtcatcattttctttttcaaaattaattcctccctcttatactttctttcccatcattcccctagtttttttaatactatacatacatctcatcgctgcttgagataacattatgattgataaaccccactcacatacacctagtctcttcttcatgtaacgaactttcttcatgccatatataatataaatagtttcttaactttgtcttaaaaaaagacgaccttgtaaaaacaagatcgtcttcttacttatattttttggtttttagggaaaatcacttcaaaacaagtgccatctccccatttgctctctactgatatttttccgtaatgcttttctacaatccaatttgcgattgaaagacctaatccagctccttctgacgtacttcttgctctatccccttgataaaaacgatcaaataatttcggaatatcttcttctttcactcctatcccgtcatctttcacctgtatgcgaatcgaactactcgtctgcgtgcaatcaatttgaatatgcccgccttcgtttgtatacttcatcgcattatctaacagtatgaccatcatttgatgaatccgctctctatcagccataaaagatacgtcacgttctacttttagtatcatttctttttcttgataagaagcaatctctttatatggagctactatttcttctaacaatttatcaagttcaaatgtttttttatccatctcaatttgattagaatcagaacgtgctagtaataataaattactaacgagttttgataaccgcctacattcttttgaaattgtagaaatatccatcgctttttcttctatcgtagcggatggtgactgaaataacacatccgtttttgattgaataactgcaagcggtgtccttagttcatgtgatgcatcagaaacgaattgctgctgtttctcccatgaattttgaataggtacgagtgctctgccagctaggaaaaagccgatacctatcgcacataaacttcctatgctacaacctataacgaggattaaaaataaagtatttaacattccttcttccgctgttatatctcgcacgatttgaactatttctccatctttttgaagcgaaaatgctctaaaatatcgtccttgtactttgatatcttgtaactcccctattttttccggagaaaacttttccaaattctcttcaaaaattgaacggaatttacgattatcgccctctattttcactattttcccattccaagttattctagttactcgcggatctccaatttggatattctccatacgttttcttggtggtattttaacatctaatttttctctatactgagccatcatttttatagattgatccacttcattataaatacgcttatatgtgtatgaataaataatactacctaatatacctattaataggataaatactaatgaattcactatagtcaaacgaatgcgtgtcttttgaaacatacttccctttttcattgttcttttaatatatatccaatacctcgaacagtttgaatatctttctgataaccgaatggttctaattttttacgcaaatgatgcacatacacttccacaatggctactgtcgtatctgaatcaaatccccaaacacgatcaaaaatttgttcacgcattaaaatcttcccgctattttgaatgagatactctagtagctcatattgtttcaatgtcaacttaatactttgtccatctacttgaacgtctttatcttttccgaacaattcaatccctttataacgaatcgtttgctgcgttgttaaactaccacttctgcgtagtaaagcgcgaattctcgcttttaattcaggggcctgaaatggcttaacgatatagtcatctccaccaaaatccaatcccttcacccgatcttctaaagaatctctcgctgtcaaaaacaggactggtgtttcaatcttttcatcacgtattttttgaattacttcaaatccatccatccctggcatcatcacatccagcaaaattgcatcatatatattttgaagcgctaaaaacaatccatcttctccatttattgccgtatctacttcaaattcatcacgcaaaatttgtacgatagactctaataacgaggcattatcttctactacaagtaagcgcatgctctcaccttccatcaaatagttcaattctatttattattacatttcttctcttcataacaaaagaatgtagttacattacgtattttcatttttaactatttccttctaaaattttgaagttttattataaaaactttgtcttaaatttagcttaataaaaaattgaaagaaataagattcctcttatctctttcaattttttattacatatacctttttactcggcaattccaaacaatttagctgaccaccgtacacagccccgccatcaattccaataatacgattactaccaaaatacactccgcactcctcactaccatgaagcgtttttgtttccgtatgcccaaatacaacaaccttttcaccgctatatccattatgaaattcattacggatccacattaacgtatatggttcagattcagaaactcgtttcatcggttcaaccccagcatgtacaaatatatactcttctgtttcaatgtaatgatctaattcttgaataaactttatatgttcctctaatacacgggagtgtaaaatcggtttttggaagtctttctcattaaccgcaatatcttcttctacaaatccatagctatataatgtcttatctccaccatttctttttacccaatggttccatgaatgttcctcatttgtcgttaacgccttaatcatcatatcttcatgatttccctttaaaatgagtgctccctcttctttcaattctcttaccttttcaattacagcacgcgcatttggaccacgatctacataatctcccagtaagattaattgatcctgtttcgcatcatattgagcttcttccaataactgttcaaacttttttatctctccatgaatatcactaataacaagaattcttttcatattatcccccctctttctaattatagttcaaaacggcagaaatttctgaactcaaatctaaaatcacatttattacaaataaaatgattatccttacaacgatgtaagtctcttgtcatccaattcgatagttgtaattactgtatttccttatactgaaagtaagaaatgaaacaaaaaacaaggagagatgagagatgaaaaaagtaatggaagttgtagtagcggtagtagaggttttcgtaaatggtaaacaagtcacaatggagttaaataaataatgaaaaggacaacatttactctagaccctttactcatataaaagagataagacttcatcatttctttgatcccttatctccctataaagaaagccgtatcccttttaaggatacggctttctcttatttttgactcgtacgagctgaaatgctaattgctctatctgttgctttggcagcttcatctaacgcttctttactattcttcccgtcatacatcgcttctaatgcttttacaactgcatctcttgattctgggaatacactaattaaagcaccttgtgttgctggagattgcttcgttgcttgcagttgatctactgttactttcaactgtgggtatttttcatattgctcttttactaatggctcattatatgcatctggattaattgagaaatagcctgttgcagtatgccattttgcttgtacgtctggcttcgttaaatatttcataaagtcccaagcaccttgttgcgtttcttctgaaaccatattcgtcatccataatgatgctccaccaataacaacaccattttgtttcgaatcctctggatacggaatatatgaaacacctacattaaacttagatgcatcaattaaatcacgaacacctgctgaagaatctaaatacatagcaacttgtccagactggaacgcggcacgaatatcatcccaacttgctccatactttccaagtgcgccagctttatttaaatcatctaacattccaaatactttctgtccttctttaccgttaaataccgccttttttgcagcatccttacggccgttttcgttatctacatataaagcaccttgtgtcgctaacaattcttcaaagaaccaaccgtagttaagcatggagaatccatattgttttacatttccgccttctttaatcgttaactttttcgctgcttcttgtaattccgcatatgttttcggagctttctctggatctaagcccgcctttgcgaaagcatctttattataaattaatactggtgtagatgaattaaatggcatagaatacatttttccatcaactgaataataatttgtaattgctttttctaattttgacgtatcgtacttatctttttttatccagctatcaattggtgtgatttttttactatcaatcatatatttcgttgtaatttcactcgattgaactagagctggcgcttctttcgttgcagacatcgttctaaatttcgttaaagactcttcatatgttccttggaactctgcctttatctcatatttattttgtgacttattatagtctgcaacaagaccatctagtactccttgtgtttttccacccatcgcatgccagaagcgaattacagttttatcaccatttttttcaactggtgctacttttgcctgtgcttcaggttttccttctgttttactatttgaacaagcggcactagataatgccattgttgctgccattaatagagcagcaccttttttaactagactcatttaaatctcaccttctcttagttatttaattgcaccttttgttaatccttgttgtaattgcttttgccctaaaaatagtaaaatcaatgttggaataacgataaccgtaacaccggccattacgcttccccaatcagttgcaacttcttgagactgaagctgcttcacaccgatttgcactgttcttactttttcatcagtggtcactaaaagtggccataaatacatattccatgttgttaaaaagctatatactccaagcgtaataaaactcgttttacaatacggaattacaacgctgaatagaaatcttatatttccaatcccttcaataaacgcagcttcttttagttcattcggaagtgtcataaaatgttgacgtaacaagaaaataccgaaagctgttgcaaaaaacggcactgtcatcccggcgaaactattgatccagccaaagttttgaatcgttaaaaagttaggcaccatcgttgcttcccacggaatcagcatcgttgaaataaacaggaagaaaattaagtttctccctttaaactgaagaaaaacaaaagcataagctgctaaacttgatacgataagttgtccaatcataacgactgtcgatacaattaaactgttatataagtatgtaaaaagtggtactttttgaaaaatattaatgaaattatcaaaagtaaactgggtcggaaataaccttctcatttgaatatcgtctggtgtcataaaacttattaaaaatgcatacagtacaggaaaaaataccattactgcactaataatgagcagcatgtataataggaaattttgtttccactgtttaacaatcatttataatgcacctttctctcagcaaacttaaattgaagtaatgtagcaagaaaaatgaaaacaaataataccattgcttgtgcacttgctgttccaaattgatgattcacaaacgcctctttgtaaatcgagtacacaatcaaattcgttgcatcatttggtccaccgtgcgttaaaatatcaatttgtccaaagctttggaacgcactaattaatgttactgttacaataaagaataaagttggtgatagcatcggtaatgtaacacggcgaagtttatataaataactagcaccatctatagatgcactctcatataacgacgtatcaatattttgtaaaccacctaatataactaaaaatgcaaaacctgtattcacccaaactgttgtaactgatacagagaatagtgcccagtccggactcgttaaccatgcgattgcaggaaggttcatagaggctaatatattattaaataatcctacacttggatgaaataaaaatagccaaatcactgcactagcagctactgatattcccatcgtcgaagaaaacagaactcggaataacccaatacctcttacttttccatttgcaatcaatgcaagaaacaaagcaaatataatactcgtaggcactgtatataaaacaaataataaagttgattttatacttttgtagaaggctggatcagagaataagtattgataattttctaagccaacgaaaagattagcttccccatgtatatcggttaaataaaagctatagtaaattgtcctaaacaatggatagaacaaaaaaatcgaaaataacaaaatagatggcgccaaaaacaataatcctattcttaaatctttcgttctcccccataattttttcttttttgacacctttgtttgaactggtaacttacttacttcgatcattatttcgccaccactttcaactcttcttcagctaccacttttaagcgttcattcgtgttttcattaaagaagcataacttttcttgcgagaataataattttactttgtcacctttgttcaagagtaactgtccgatgactttcgcactccaagttgttccatttaccgcaaagttcaatatagattcattccctaatacttctacagattgcaacgtcacttcttgtccctcctcagacagtgcaatatgctcaggacgcatgcctatgcgaattgttccttctggtaattgctttaactgtctaatagataatggaatttgcaattgccctatatgtaatacacctttttctttatttacttccccatcatttatattcatagaaggagaacctataaagcttgcaacaaattcgtttgctggttcgttatatatgtcaagtggtgttccaacttgctgtatacttcctttatttaaaaccatgatacgatctcccatagtcatcgcttctatttgatcgtgggtaacgtaaatcatcgtaattcctaatcgctgctgaatttctctaatttcaattctcatttgcgcacgtaatttcgcatccaaattcgaaagtggttcatccattaaacagattggtgcttgactcacaattgccctggcaagtgcaacacgctgtctttgtccgcctgataattggcctggtttcattttcacatactctttcagtcctaccatttcaatggcttccattaatcgcttttgtcgctcttctttttgtacttttcttaccttaagtccaaataaaatattttcttctacagataagtgtggatataatgcataattttgaaataccattgatagattacggtctttcggctctagatcatttgcaacacgttcattaataattaaatctcctgaagaaatctcttctaagccagcgatcattcgtaataatgtgcttttcccgcatcccgaaggtccaactaaaacaaaaaattcacccttcttaatatgaaccgatacgcctttaaccgctgtctcttctgcatttttatatacctttgaaacatttttcaattcaatcacaaggttgcactccttttttcttcttgtatccatacttcataatgacttgttgaaatcgcacttgctcctgcatgaattgcaatttccgcatcttctcgcgtttgaatcagcccacctgcaataataggaaactctatttcctctactagctgtttaattatagaaggcataatccccggcataatctctactgcatttggtttagtcgttttacaattttcaattgatttagtaagggataaagtatctacaataaaaatacgttgaattgttttcaatccaattttattagcatttcgaattgttgaaccctttgttgaaataataccttgtgccccgataacatcttgaatatacaaaagcgcttcctctgtattcgtatttaagccttgtataaaatcacaatgaagaaatacatcatgtccatgtttctgcaattcatatacacgctctggtaattccagcattgaaccagtcataagaaaaacttttttcggcaattttttgtatgctttgtatcctttccaatcctttatcatcgcaatataaggttctttaaacatttttccacctaactgttctatttttatccaaactaaaaacacctacttacatagaacgcctttctccttatttgaactctagggaatagagcacacctaagaaagtggcacattatatgtaagtgggtgttctcaaatgttctctaccctatttattttgttacctttactatattacgcatttattaagtcagttttgatagattgttaattaggtgttaatcaaatgttaatattcaccatattttcttaatattaatctagatatacaaataaatcccaacggcaaacaactatctttaaaatttaagtgatatgtaaattcattccatagttaataagttttagttttctcgcaacggcttgtgaagcataattattccaagaagtactataaagtggaatgcttttttcttcttttattgatatcgcccaggctgtaacaccatcagtaccatatccgttcccttgaaactccgctaaagtttccacacttgcctcagcagctacgggcgtacttctggcactgcaacaaacagaaactaccttttcattttttacaattgccaaataaggttgcctccttatttactccatttaccatccattcataatctatttttcatattcaaaataaaaatcccattcaaatacacattactgaatccatcatactaactgatttcttcattctgtctatctaaatgggattatttttcgttttttactctactggctgttgtggctgtactacttcattcgctccagctaccctcaacatatttacaatatctttaaaacctcttttttcagcgtattgcagtggcgtcagatgttccttgttagccatgtttacatctgcaccgtgatcaataagcaattgaattactttcttatggttttcactaccatttcctaatacaattgcttctaataacgctgttccaccacgttcatttgtataattcacatcaatatctgtatgctctaataattctttaacaacctctacatggccacgctcagatgcagaaataagtgctgtcccacctgacctagtcgtttctttcgtattaactcctgcattaattaatacttttacaatatccgtatatccttctctacttgcataaagaagtggattactttttttctcatctttaatttcaatattagcacctgcaccaattaatgctttaactgtctctacatgattttggtacgtcgctgcaaggacaggcgtttctccgttgtcaccttctacgtttatattcgctccatcctgaatcaacttcatagctgtctctgtatctccaagggtagctgaaagtaacaactgtttgtccattaaatttatacttttctcttctttagattcttcctgttctttatgcttctcttttttcttttcatttttcacatgaaccggtttcgattctggttcttcttgcttatcgcaagccactaccgtcattaaaagtcctaataaaatacataataaaattttttgttttctcacaactacagctcctatgaaagataatgttttcttaaccattcctccatcacatacaataactcttcttgagtacatttatccataagccctttatattccttctttaatcggattatcttaagcttatactatgtttctcaacctattgaaatgatacgcctgatggccccatcattaacattatgaagcaattagtttagcacgtttttaccgcatttgtatacatttctaaaaagtacataaagtgaaactttaattagtgggggttttgttcatccaccactaattattagcccacaccaatcgggcttttacgggcagcccgactccacctaacttctttgctttcactaaattttgaggtggggatcttattgcccgttaatgcgggataaatgattgctttaggttactatattccattgtaaccgttcttctaaaaattttacaccttttctatatttgcacctgattaataatagaaaaagacaactatatagttgtctttttctattattaatgatgtccaccatgatttcctgctttcggtttccccatcatctctttattcatttcccatttatgctctgctagctctttatatgaaagaactttccccttatagttagatacaaagctctctgcatcttttttatttttaaatgaaatgacattataagccatcggtgtcgttattgttttatcatatacgtaagtagcgtcttctaacgaaatccaatctttcgaatcataatctcgaacaaatttctctttcgtcttttcacctgagttgatctccatccatttatacatacaaccgatatcatcaaactttaacgcttttccattttctaaaataatttctgttgcaaattgattatctgttaccccaatttgacaaatatcacatttatcatgtttctcatcaatggcaacagctgctgtttcctttttcccacacccgactaccgtaaatacgaaacataaacatatagcaagtacgacatattttactttcatcaatattcctccctagaaaccgtatactccacgaaaagaataccaaaaggttgtgtgagatttgtgaaaaaacaatgtgctttttgtaatataggaaacaaaaaaagatgtgtagttatttctacacatctctcatcactcacaacctgtaattaataaatcatcttctaatttaactaataatgtatcctcactaatttcctgtccaacttctacatttaccaatcttatatttccactaatcccgactgcaatttttttaagctcaccgtcattttttcggatcatcagtaatttctcccattcatatacgtaagaagattcattaataaaaatctcctctacttttccttcataagagctataaatctcttcaattctcgttttcatataacatctactccctatttcacacttcactattttcatcttattctaccattcttacgaggagcagcttactttttaaaaattcaaattaactaccatgaacaaaatgaacaaaataaaaattatgcttctaatgatgttatttttcaaattatttaccatttgaatagatgcttttattataaataaaaaacctttttctgaatttttattctattttgaaagcgcaatcattcttttgagggggaaattacatgttagcactacttggatttgcgatggtatttgtctttatgtttttaattatgacgaaacgtatgtcagcgctagtagcattaatattaattccgagtgtttttgcattaattggcggattctatgccaatatggggcctatgatgttagagggaattcaaaaattagcacctactggtattatgcttatgttcgctattttatattttgggattatgattgatagcggtttattcgatcctgtcattagtaagattttaaaatttgtaaaaggagatcctttaaaaatcgttgtcggaacagctatattgactattatcgtttctctagatggtgacggtacaacaacatacatgattacagtttccgcaatgtatccactatataagcgccttggaatgaaccccctcatattagctggagttgttatgttaggggcgggggtaacaaatcttacaccttggggtggacccacagctcgtgttatgagcgcacttggacttgaggcttctgaattatttacacctcttattccaggaatgattgctggtgcaatttgggttgttttcgttgcttactatcttggaaaaaaagaaagaaaacgtttaggaattatggatgtacagtatttaaaacaaatgcaaacaatggatgagcaagctgcaactgtcgaagccgcagtgcataaacgtcctaaacttctatggattaactttttattaaccgctacattacttgtctgtctcatactagaagttatgccgttacctgttttatttacagtcgcttttgctattgctgttatgattaactatccaaacttagaacaacagaaagaacgtattgcttctcatgcagggaatgtattagcagttgtttctctcgtatttgctgccggtattttcactggtattttatctggaacaaaaatggtagatgcaatggctaacagtgtagtaactcttataccagatgcacttggaccacaattgccaattattacagctcttctcagtatgccattcacatttttcatgtccaatgatgcattttactttggggtattacctattttaactaaggctgctgctacttacggaattagtgcagctgaaatgggacgtgcttccttacttgggcaacccgttcacttattaagtcctcttgtcgcttccacttatttattagttgggatggcaaaagttgattttggtgaacatcaacgttttactttattgtgggcagttggaacgacaatggtgatgttgattactggcattgtaattgggattattccaatataagacgcaaaaaacagtagaagaaataaatcctctactgttttttattatgaagaaacaagaaaataccgtctctccggtctccccacactcccatatattagctctgcgtggactttcttcccagatattaaatactctaaatagcgccttgcagttgatcggcttacgcctaccattgaacttagtacctctgctgtaatcccttcttcattaactgttaacatatgcttttttattttcgctaaagttaaaggatctatccctttcggggcatattccatttcatttcccttcacgcctctttgagaccataaatattcaatttgttccgtagataattgattgtttttctttaactgtataatctttttttgatagccttccagacttgctttaaatcggtcaaacattagtggctttacgatataatctgttactccgccccgcagggcgtgcctcactacatctgcttccgatgctgctgtaatcataataatatctgtatcgtgcaaatgattcctaatatatgtgacaagttccgttccttgcatatcaggtaagtacacatctaataaaacaagctgtggcttcacaagctctagccattctttcgcttgttctccagtcgttgccgttccaattactttaaatccctcaattttttcagtaaaacgacgatgaatgtccgcaatccgaatatcatcttctacaattaatacttcaatctcctcacccattactattcgcctctctctttcggtagtgcaataataaataacgcaccacctaaatcccctttttcgattgcaatacttccatttaaatcttctactaactctttcacttttgctaatccatatcctcgctctcctccttctttcgtcgaaaagcctttatagaatatgctagtaattatttcatcatgaatcccttgccctgaatcttccacttcaattaatatttcttctccaatatcagttacaaacatccttactttcttatcattctcttcatttttttcaattgcttcaaatgcattcgtaattaaatttcctaaaatagaaacgacataattactctcaatatgtggacttaatttgtctaaaccactttctctatctagcataaaatcaatcttcaactctcgtgctctattataaaatccaattaaaattccacctagccatggattttgaatccgcttcataataaattgaacaaaatcttgatataccgctgtttccttatgaataagctctaaagcatcttcgtatgattctaattggataagacctgaaagcgtatacaataaattgttatattcgtgcgcttgcgctcgtaatgcctctgtatattgcttcgtctgagataattctgctgttaactgatccatttcagatttcaaacgtaagctcgatacaacgccagttactttattctttactttaataggtagacggttcgcaataacagcctgtccttttatatttaattggcgatcaaactgttcttcaccagtttgaagtacatctagtatcgttgaattaggaattacatttaaaataaattccccaataatattttgttgtttatctagcgaaagaatatcataggctgcttgattgactaaactaatcatgccatttttatcgattacaataatcccttcacgtacagattgaatcactgtactatgctcttcatataaagatgaaatttcttctggttccataccgaacatcattctttttatacttgccgctaaatatatagagccgattactccaattaatagccctattattgtaatccaaaatacacgctttccatacacttctaccgctccatgaatatcatccattgaaaatccaacagacacaacaccaatgatttcattttcctgattacggattggaacttttccgcgtaatgaagggcctaatgatccagttgctttcgaaacatatgattttccttctaataaaacgcctttgttatctccaccaatcatcgcttctcctattttatctcgctcaggatgtgcatatcgaatcccctctttatttccaactacaatgaagtcagcctctgtatccattcgaattctttctgcaatcggctgaataatagaagctgggttttctttttgaaaagcttcctttatttcaggtatagcagcaactgttttcgcaacatgtaaagcccttttgccaatttgctcttctaccgtttcagataatatgtaataaaataaataactcgttagcataagtacaactaaaataagtatactaatagttaatgtaattctcggttggagttttaatttttttaacttcaaaaccattcccctaacatgattaaagatagaatttaaagaatatacagtctctttaattatacttaatcataacacggttactctatatttctttttctcttcataaaaaaagaaacgaagtaaaattactacctcgtttcttaacattcgttattacactttaaacttactaatcatctcttgtaattcttctgccatttgtgataaatggactgctgctgcatttatttcatctactgaagctaattgttcctcagaggaaccagcaatattttgaacgcttgctgcattttcttcaattgtagctgcaatttcattaatagatgcacttacttgttttgcatctaccgtcatttgttttgctacatctaccatgttatcaatttgtacaactgtatcatccgtagatttcaatatttcagcaaagctttgcttcgtttcatttgcaactacaagtcctgattgtacttctgctccaacttgattcatagagcttactgtttcttttatatcaaattgaatctctttcactagtttcccaatttccgtagaagactgtcctgattgttctgctagctttcgcacttcatctgctacaattgcaaatcctcttccttgctctccagctctcgcagcctcaattgccgcatttaacgctaataaatttgtctgttctgcaatatgttgaatcacttcaaggattgctccaatttgtttcgacttatcgtctaacaaaccaatgattttgtctgactgtgaaacagactcatgaattaattgcatttgattcacagtttgttcaactaacttcccaccattttcagcttttttcttcgtatacatagaggctgtagatactaatgaagaactatctgcaacacgctgaattccttctgtaacttcttctaacaatgttgctccttcttcaacttctttcgtttgtatttctgcaccacttgatacttgctctatcgcctgtgtaatttgttccgttgcttcgcttgtctgcttcatactagctgttaattcttctgaagatgccgctacatgacttgctgaagtgtttatattggaaatgacactttgtaacgatgcagccatctcgttaaaactttctcctagctgcccaatttcatctttagaatgaactgtaattgactctgttaaatcgccttcactaatctttttcgatgagataacaagttgttttaacggactaataatagaagcaattatgaagtaaattaaaatcccaccaattactaatgaaataccaataacagttattgttttatagaaaatagggttagctgcttcgataatttcttttgaaggcataattcctgctattttccatccagtctgcttatttgttataaaggtaatattgcgatcatcaccatcaagtttgaatttaaaatcacctgtttcttgtttatacaattccttctccactttttcttctaccttgtcacctggcttcatcgtcggatgcgctattacatttttagattggtcaaagattgctacatatccttttttgccgatattgaccatttttgaagtatttacaatatcattaataattaaatcaataccgagaacaccacttttatcctcattttgttttgctattgtaataacaatattccctgttgtacttgacttatatggggctgtgataaccacttctccgctttttttcgctgcttctttataccaatctctttcggtaggattatacccatctggcatttgaatagacggtgattgaataaattgtcctgtactagatcccgtataaactgcttctatttctggatgtaatttattatattcttctaatttattttgcacattttggagctgatcagttccgtaacttactccattaaataactttgtaaaatatactgcgtctacctttttactgtctatctccttgttaataacattatttaaaatctttacgttatcttccgctgattgtaaaattgtttcattaaaatttgtctttgcttgttgataagacgtccaaccaattacaatacttggaagaattaaaatgataacaaatgacacaagtaactttgtttttaaactactactccttaatttcccttgaaacatatttctacccctccataccgttttaaatgtaattatctcacatttaatttatttatataaattacacgattaattgtattaactctttgtctctttttctattaaagagttaatacatacctttttcattctatataaattaaataattaaaacaatatataaaaatgtatattattcgaaatattataattcacagaagaacctccagtatttcacttactagaggttctttccaccttactattctttatctttttctacttcttttttctcatcttctactacagatacaacaggtttatcacttgataattgttgtaccgctccttttccagcaaatccttctaatagctcttttaagtcaattccagaagaagcttttaacgtttcttgcatcgttgccattaaatcagttgcataacccgcaacttttccggcgccgctatttttaccaccgccgcctgtatcaacaactgtaattttatcaatgttactaagcggacttgcaacttccttcgcataacttggaagcattttaagaaccatatccataattgccgcttggccatataactcaaatgcctctgcaattttttgcttcgcttctgcttctgctaaaccttttaatctaataacatctgcttccgccgtaccttgtgctttttgtacttccgctttcgcttgaccttgcgctttttcgatttccgccttcgctaaaccttctacacgtacttcttccgcacgagctctcgcttcagcttcaatcttatattgatccgcatctgcctttttaatttgttttactttttctgcttccgctgattgctcaacagcatagcgatctgcatctgcttttttcttaacttctgcatcatattgcttttcacgacgcgcaatctctttttcttctaactcgatttgcttttcacgctcaatgattttaacgcgcatttgctcttctgtaacaccttgttgtgctttcgcttgttgtaattcgtaagaaagatccgcatctgcacgggcttgctcttgttccctcttataggactgtacttttaattctttatgtttttcagcttcagcgatttgtgcatcacgttgatattctgcttcttttgcctctttttcagcacgtgctttttcaatacgtgcttctttttcacgctctgcgttcgcaattgttgcatcacgcttaacggtcgcaatttgcggctgaccaagcgcatctaagtatccgtttttatccattatttctttaattgtgaaagaaacaatgcgaagtcccatcttctttaaatctgtagaagctacttcatgtaccttttgagcaaattgctctctattactatacgcatcctctactgtcatagaagataagattgcacgtaagtgaccttctaaaacctcttttgcttctacttttaactcttccgtttcttttcctaaatattgctcagctgcagtagatacttcttcaattgtagaacctactttaataatagaaacaccatttactgtaactggaacaccttgcttcgtatacgtatcacgtgtaccaacttctaatttgtagtttaataggcttaaaggttctgctctttgcataattggaactacgaaagtaccgcccccgcggataatcttaatcttctttccatcatcagtggtaacaacattctttcctccaccaagccagttccctgtaacaattaacgcttcatctggaccaaccgtacgatacttcgtaatgaatactaaaatgagtagaattaaaattgccagtaaaactccaccgataattaatggaatcgtcatgtaaattcccccttataattttggtttttttaaagaataagcgatgttttgtacaagtaaaacaccatcttggactccctcgataataacctctgttccttgcgaaatatctttttttccaactgttttagctgggattgcattacttccaaattgggatgaaattaatacttcaccaaatccttctgtaggaattgtcgtaatgacttctcctttgcaaccgataaattcatccatacgttgtacggtattttgctctgcttctgcaatcggttttaaaattagtattttcatgatgaaaacaccgataaaagatatagcaaatgcagccccaaaaatagtaatactattaaaggaaaacaaatattctcctatataactaagcccacataacatggcgaagaaactaagtaataaagtaacaacggatacagctccgcccccaaaactaaatatcgattcaaatatatctccaaagaagatataaataacagtgagtatagtagcaataataaatccatataaataaattgtttcaagtggataaccaaacaagaccatttcttatccccctttcttaaacaatcccttttttgttatatgtatgccccacctctttcaaagattatagttcttaattttcagttatttaccttttaaagaaaagcctgtaagacaggcctctaaaaaagaacaggagaaacctattgtgacaggctcctcctagaaaataaccgatatattatatatctatataatatactattttccacaaaaagtaaagttaaacatacattggaaagacacttattttactgataatttgtacgttccatcaccattatcatatttatatacatacaagtaatacttgcctggttttgcattaaatttcgcttctatatgattcccattggcttgaccgtaagctgcataattttgcatatctgattcatggtgaagtacccatgtcatcccaattccatactcatttaaaacagaaatgtcgatatctttcgctgatgctacattaaatgtataaacatcagtgtggtccccgccaataagactgccttttatcgtactatttagcccgatacgatttgcttcttctagacgattatttggttctgattctgttaaacttccatctttaatcgtaacagttgtttcgcttctgctctctttgcctttatcatcttttactcttaatgatactttataagaaccttctctttcatatacatgtactggattcacttctgcacttgtgcttccatctccaaattcccataaataagaaacaatttttccatcttcatcgtttgagccatcacttttaaattgaattccctcttttacaagaccgctataagggccatttatattaaccgttggagctttattttctccatcatcttttgcgattccatggaagactacatcatattcaaattcatttgaactattcacacgataattgacgaagtatgctgtaacagttttgtagccactccattctttttgcgccaattgttctaaagattcatttactcttttactcattgctttccaatcttctgattcaccttttgtgacactacctgtatacgtaccttctaatgtaaatgtattaaagaattgagaattatgttttgtcatttttgtatctttcataggcaacgtatcactaatttcttttttcacttcagttaacgatttcggtgcatgttcagctaaataatcatctgctacttccggtacattatatttatcttgattatcaattaactgctgcatatactcttgatactctttatttaacttaggatctttacttagattttcatgatatgcatcataatttttcacgtcattcgcacgaatcaaatcttgaattttatcaaatgtttcaaactgatgcgtatataagtaagactgcaatgcgaacgagtaattatagaaatcccaagaaccgtatttagcaaatagtgtacgctctgctgtataacggcttgcaggatcagatgataatccgctaattatactctttcttggtacaacgttattcgtacgagtagatcctgcgaaaaactctgcatttccttcttggaaccaagttagcctttcattttgatacatatctcctcttccaaataaaccaggaacttcatatctcccttgcagataatgagtaaattcatgacggaataactcttctaaactataaatactttgctctggtgtacgctcatatgtaaagaatgtacctgtctcttcaatataaattccaccgttgtttgtttcatatccatacaattgtctatttaactgatattcatctggactattataaattacgatcgttaatacatcatccgcatttcctggctctaacgctttgtcatttccaattacacggtgatactgtgcctttacttccttcgcagcccaatatagtctcttaattttttcttctgatactttatctcctgttttgaacacaattgatccatcgtcgaatgtatacgtttttggtaagtattgctcttttccttctttacgtattttctctaaatctactgtattcccgctataatctttaccattataatttgttgtaatttgttctaccgcaacaaaatacggttcacttaagcgcgggtacatatgcattgcttgtgtaacaacctctaatcctttatttggattactatgaaacttccctaaacggctagcaaaataaatgccattattaacaagccatttattttctggcgttacttcatttagaagagcaatacgatttatttcattaataaacccatctacttttccataccacatcgtttcattcgcttctttacgagcttcagttaagtacgactgtatatcatagtcaataccttgcatgatatcgtatattgcttgtcccttcattcgatcatttacataagtagtataattatcattgtattgctttaaaatattcgatgcgtattgaaccgtttcaacatcgcttgaagcattactaattaatttaccgtatgcagatacgactgtatcttgttcaactgtaccaagcttaaagtttggattgtttgcgattgcttttaaagcaggtaaacatttatcctggaagcttctttcatttaagtcgcttaattcactattataaaatgcaagataaaaagctgaacgcagcacttcagtaaacgtttgaattccttttgaatcatctttcgtaaatgtactacctctatgagctaattcatctataatgacttgcatttttcctttatctttataaaaagcctttgcatcttcattaaactggaataagtctgtaatttggtgccacttaatactgcctaacgtttcaactaattctcgatcattcattttgtttaaatcagccattgaatagctttctttaacttgctttactgcagttttcttcgtaatagatgctggtcgctgtgaaaaatctcctacttttaaacgttcttgaaatgataaagtttcatcaacttttgaaatatgtccaacttcatctaccgacttttcaattccaaccggtttcgttttcaacacgttatacggtactttttcttccgctgctgcatgagtttgaagtgcgcctaacgataaagccattgtactaatgctaagcatcactttattgatctttgatttcttgttcatatccttgccccctattttaatattccattcaagaatttaacataaaatctggatgtaacaatataaaatgcaatatttcatattatttcttcctataatttgtacatatcgtgaacacattgctctttacctccctaaaacaaattgcatcctttcacattataaaaaggtaattttttgacaattaaaaacttaattgttatgattattataattgttaactttattaaataagggtgggattctatgataaaaaaagaaaacagtgtattttatatctccttcttgctaacaacattattcattatatggggaattaccccagcaagttggatacaaggctacgatttacaaagtgttacatcttctttaaactcatttatcctcaataaatttgggtggttttactctctacttatgactacaatgattattttggctgtttatttagcattttctaagtacggttctattcgtcttggtaaagatggagaaaagccaaaatataattatccatcttggctatccatgttgtttggggcaggaatgggaattggactcctcttttatggaatcgctgaaccgatttcacattttacagatccattaacaggaaaagcggggacagaggaaagtgccaaactcgctatgcaatattcatttttccactggggactctttccgtggtcactatacgcaatggtcgctttaacaattgcatatttcacattccgcaaacaaaaaggtagcactatcggggctacagttactccattatttaatcgatcgaaaaattctcgtatcggaaaaacagttgatattctagctgttttagccacagtatttggcattgtgccatctgttgggattggtgctcaacaaattgctggaggattaagctatttattcccttccattcataacactttacttactcagctcgtacttatagctatcttcgccgttttatatttaacgagtgcacaaactggcttagatcgtgggattaaatatttgagtaacttgaatttctctcttgcaggtattttactcatctctttcttacttttaggaccaactgtatttattatgaaatatttcacatctacactcggttcttatatcggcgctttacctagtatgggattaaatttaggagcatttaatgaaaaatcttcttcttggattgaaaactggactattttctattggggatggtggatttcttggtctccattcgtcggtacattcatcgctcgtatttctaaagggcgcacaataaaagaatttatttttggagttgtattagtcccgactcttatctgtacattttggtttgcagtatttggtggtaccgcaatccatatggaaatgttccaatcgcttggaatagctgatgaaattgcaaaaaatggtacagagattggattatttgctgttatttcacatctaccattctctacatttttaacgattatcgggttaattttagtagccacatttttcgttacttctgccgattcagcaacatttgttgtttcaatgcaaacgagtaacggaagtttatcaccgaaaaatagtttaaaacttatatggggattaacaatcgcgataattgccgctattttattacaagctggaggattaaatgcactacaaatcgcagctataattgctgcgctaccattttctattgtagtcgttcttatggttacttcactctttaaagagctacgaaaagaagatgttaatttgcaaacgaaagaagtgccgaaaaaaataaaaaaggttatgtaacgattggcgcctcaaatcacttctaaatccgtaataaaacccattcatatgaaatatcattttcatatgaatgggtttttcactctattatatagtgttgtaaacatgctttttcctcaaagcctactttcttgtacaatttcatcgcacgatcattattcgtattcaaacatagtactatctctctcatcccttggaaggagaaaatatactgaattgcaacttgtaataactgctctccgacaccttttccatttatatcccccttaaaaaagacattatcataagcctatttcaaaatgaaactgccatgataatgtcttctcaaaaacttatacaattattttacaatataataagataacacgttatttatttcttaaataatctctttctaaatacaaacatactcagtgctgaaagaactaatactacgcctgaaagtaactttgatgtattcgcttgtccacctgttgctcctaatgatttcttactttcttcctgtttattagcaactggtttattttctttcacaacttgatgattcatgttttgttcttggactacttcggatggatttactgcttcttttgaaccttcaatttcttttcctgtttctttcccctccgctttcgactcttcaactcctgttgttagctcgtccacttcttcttttggctcttcaacttcttttgcaggttctttcacttcttctttcgatccttcaacttcttttaccggttccttcacttcttctttcgatccttcaacttcttttatcggttctttcacttcttcttttgtttcttcaacttcttttaccggttccttcacttcttctttcgatccttcaacttcttttatcggttctttcacttcttcttttgtttcttcaacttcttttaccggttccttcacttcttctttcgatccttcaacttcttttatcggttctttcacttcttcttttgtttcttcaacttcttttaccggttccttcacttcttctttcgatccttcaacttcttttatcggttctttcacttcttcttttgcttcttcaacttcttttaccggttctttcacttcttcttttgtttcttcaacttcttttgttggttctttcacttcttcttttgcttcttcaacttcttttaccggttcttttacttcttctttttccactatattctgtataactgttccgttaaaccttatgctaatttcatcagaatctaaatcaaatttatacaccttttcacctggcgtattccattttattactccgttattaaacgtccctccctcacttgtcaattgaatattttcaatactttctccttctaaatcatatacaggaacttgaatttcttcgtttatttttgcatcatttaaaatgatattttgtcttccaacatcaattgtaaaccactgccctaattgtattaacgacctgacatcacgaatctcattcccagctagatttaagctaaataagtttagcatggaaccaataaccgttacatctttaatatgattgtccgcaagatttaaccactgtaaattttccaatgaagatagtggtgttatatcttcaatttgattatgagatacattcacattattcaattgtttcaagtttgagatgaactcaatatttttcaggcctactccttctaaagtgagtttttctaagttcgtcatgtactctaaacctgttatattttttatctcatttccattttctttaaatatctctaattttttaatctgtaataaatcttcttttgtaataggagcgtttaaattctctctacctaaattctctttattaatatgttgttgtaaagttttatcgagaattatattttccttttgttcattatcctcttttattgtttccttgatttcgtctaatctttcaacaacattttgaattactgttccattaaacttaatacgattctcttctggctttatatccaacgtaaattcatatattttttcaccagtagtcccccatttaacagaaccattattaactatcccatcttcactcttcaattgaatagtatcaagtggctctccttgtaaattatagataggtattttaacttccttatctttttctacattatctaaaaagattttttgtctttgaatatcgatatatatcctttttcctagctcttgaacaggtctaacatcacgaatttcatttgaacctagctttaaatcatataagtctgttaagtgactaagtggcgttatatctgaaatatagttttcttctaaattaagtgattgtacagtagataatcttgataaaggttcgatgttttctaattcatttttagcaagatctaactctactaattttttcattgatgtaatatgttcaatattcgtaagtccattgttacttaaagataagttttttacatttttcaattgctcaattccagcaaggttatcattactaatttgattatttgccacagtcaaagtccttaaagatttcactgtaaataatggtttaatatcttttatataattactatttaaatctagcattttaatcttcttcatttggcttaatgggcttaaatctgagattttattgtttctcaaagttaaaaactcaatatgctctaactcagccaaaggtccaatatcttcaagttcaccataggttatacttaatgattttaattgtctcaatcccgagataaattttatattttttaacttaacttcttccaaagttaagttttctaagttcgtcatatattctagaccgcttacgtcttgtattcctttatttttagcttcaacgactattaaagctttaacttttaataaatcttccttagttattggggtatctagattttctctattcaaattatatttattaatatgcctttgtagttgcttatctactattacatttccaattccatcttgttgatccactttatcctctttattttccttttgtttttctggaacattgttctctaaattcaatgtatttacttcaaactgtacttggtacttattatcataggccattgttggaatataaatatgcattcgcatattatacctttttcctaattcccctacttcaaaccgaatcactttcgttccatttttctttttatcttctgatattactttcacatcatgaaacacacctggagtatgaatatcctctgttttcaagtattgaaagaaatcactatcacttaatgttgctgttacaattttctttccattctcaattgttaatttcggatcctttatataaacagctgccatagactcttcattcgttttatctttatacgctttaataacagcatcatatgtaccatcttctaaaccttgtccagttttattcgcctcaattgctactgccgctaaagcaggtgttgaataaacagcaaacggaagtgataacgctgccgctataatcattgcatttatacgttttcttttattttgtttcaactttacatctcctccgaaatatataattcgaaatgtaatcatttctcgaataaacgataatgattttcattatcattgtcaactaggaaaataaaaagtttacaaaaaaagaacctctttaaaagaggttatgccattttctcacctgattcttctctaaaaaagcttttcatcgcatgaaatacgtctgctttttgctttaaaatatagtatctaaagttttcatctttaatatttttataggctgacatgagtgtactatggcggttgtactgattcacttccccatacccaaacatattacacttcttcattagctcttcaacaagttttacacatctagcattatctgatgttaaattatcaccatctgaaaaatggaatggataaatattatagcggtctggtgaatatttattatcgataagttcgagtgcttttttgtatacagaagaacaaatcgttccgccactttctccttttgagaaaaactcttcctctggaactacttttgcctccgtatgatgggcaataaattcaatatctactgtttcatactttgtgcgtaaaaatcttgtcatccagaaaaagaagctacgtgccatatatttctcccatattcccatcgatccactcgtatccatcatcgctaatacaacagcttttgaatctggctttaatacttcattccaagtgcggaactttaagtcttcttggtgaattggatgaaaagatgctttaccactcattgcatttcgtttatatgcggatatcattgttcttttcttatcgatatttccccataatcctgtttttctaatgtcattaaattcaacatgttcaatccggttttcatccatttcttttctctttaaattaggcagttctaactctctgaaaaacgcttgctctaattctaaaatagagacttcagcttcatagtaatcttccccagctgcatctcctgctccttgcccttttcctggccctttttgtttttgaccacctgatccatctctcgcaacgacatcaccaactttgctgtcaccgtttccttgcccaacatgtttatttttatcataattgtatctaatcttatattcatctagagaacgaattggtatttttacaacatccttgccattagacataactatactttcttctgttacaagatcgggtaaattattcttaattgcctcttgtactttttcttgatggcgctgttggtcgtcatatcctttgcgatggagggaccagttttcctgtgaaatcgtataatttggttgattttcttcgcccattcctttccctccttactgtaattgtcttcctgtatgaacagcaatctataaattttgttctgtaatgtgcaagctagaatgtttgaaaggtaactgcccacagaaaatcatcccataaacatttataacgtttttcatacaataccccgagcatcctaaacaaaattttgccactcacataatagaaagaaatattcagccactgataagaaagaaacacaatgcattgttgcacatatttttactttgcaacatattgtattgtgttggcttttttcgtatgaatggttggttactctatcatatgcatattgtaaaaataattgacaataaattcataaaattgcatcttaatttattacatttggacaaggtatgacactttatacacatatgaacggataataaaacgctgtcccgcaaaatacaagagacagcgttttgttatcaaactatctgtttaacaagctacctacatagcgtagtaattcatttgctgaagaagaattatagccatgctcatcaattaaacgcgcaacaacatcattgattttcttaagctgattttcgtccggcgttttcgttgacgttgtaattttcactatatcttttaaatcagcaaatagttttttctgaatcgcttcacgaagacgttcatgtgaattataatcaaagcgttttcctttacgggcataagcagaaatgcgaattaaaatctcttcacggaacgctttcttagcattttctgaaattccaatttgctcttcaattgagcgcattaatttttcatctggactcatttcttctcctgttaacggatcacgtaatttcgatttattgcagtacgcctcaacgttatctaagtaattatccataagcgtcttagctgattcttcatatgaataaacaaacgctttttgtacttctttcttcgcgatttcatcgtattcttttctcgctaatgagatgaagttcatgtaacgttcacggtcttcattactaatggatggatgctgatctagcccatcttttaaagatctaagtacatctaacgcgttaatagatggtacctcttttcgaatgattgtagacgaaattcggttaatgacataacgaggatcaatacccttcataccttcatcttgatattcgcgttgtaattcttctacatcaatcgcattataaccttctaccgtttccccatcatacaaacgcatctttttaattaaatcaatatccggacgcttcggatcttttaaacgagttaaaatggtgaacattgctgcaacgcgaagtgtgtgtggtgcaatgtgaacattcgatacatcactttcacgaatcattttttcataaatatgttcttcttcacttactcgtaaattataaggaactggcattacaataattcttgagtgcaatgcttcatttttcttatttgctataaatgagcgatactctgtttcattcgtatgcgctacaattaattcatctgctgaaataagcgcaaatcttcccgctttgaaattcccttcttgcgtaagtgataataagtgccataaaaacttctcatcgcattttaacatctcttggaactccatcattcctcggtttgccttatttaattctccatcaaatcgatacgcacgcggatctgattctgaaccatattctgcaatcgtagaaaagtccagactacctgttaaatctgcaatatcctgtgattttggatcagacgggctaaatgtaccaatccctgtacgacgatcttcagagaagaagatacgctctacaactacatcctcaattcttgatccgtattcttgctctaaacgcatgacatttagtggtgataaattcccttcaattctaaccccatactcatcaaagaaatcatctcgtaaatgatgtggaattaaatgcagtggatcctcgtgcattgggcatcctttaatcgcaaaaattgctccgcgatctgttcttgaatatgtttctaatcctcgtttcaacattgtaactaacgttgatttccctccactaacaggacccattaataataaaattctttttctaacatctaatcgttttgcagatggatgaaaatattcctctacaagacgttctagagcatcctctaatccaaagagctgattactaaagaagttatactttcttctaccatcaacttcttcaattccagcatcttttatcatattgtaaatgcgagagtgtgctgtttgagccacccatggtctttctttcacaagctccaaatactctgcaaacgtaccttcccattgtaaacgttcttctgctgctcgatgctgttcaatcttttttagaatatccattatagctcctcccccatctccttgttcaatcggattattataaaaggtatgctaggatgtccttaaacattctttaaatcaaaacgaaatatataatagcacactaaaattctctccaaaattcaaagaaaattctgtataatataggtattaacgtttttacactgctattcattataaataaattcttttcttctaagaaccttacatacattttgggtaataaataaaactcatgaaccgaaaaaagtaaggaggatattagtatgaaattattattaattttaggtgtatcactcacatttcttacagctatttttacatccggttacaatgacaaaccaggtacacataaaaaatgatgtgcttttagcacatcattttttttatttataatacatattttccatatcatatttggatagtggtcggctataataataaccttgtacaagcttcacattcttttctttcaaaaactgtatttgctcctttttttctactccttctgcaattacatttaattctaaagtatgagctaaatgaataattgcagctgtaatattcgtatcacgttcatctatatgtataccttccataaaagaacgatcaatttttaaagtatcaattggatatgtttttaaataacttaaagatgaatagcctgttccaaaatcatctaaatgaatctttaaattttgctcttttaattgtagtaacactctcttcgatatatctttatgtataagagctccttctgtaacctctatcgctaataaatgagttggtacattgtacttatttaaagcccgtgtaatcatctctattaatgtaatagaacgaaagtgtctagctgaaatattaactgcaattgggaccacatcataccctttatttaaccattcgcgcaattgctgacacacttgatttactacccattcatccagcttaataataaatcctgttctttctgccaacggaataaattggtttggagaaacaaatcctaattccttattctcccaccttattaaagcttccatactagctatttttttcgtttcaatattaatttgtggctgataatataagaaaaattcatttttttctatagcacgatgtaactggttttctattataaacctttgttcacgctcacagtctaatccactacaataaaaatgataatgtccttttcctttttcttttgctttttctaaagcagcatcgactctctgaaatagtattttttcatcttctccatctgttggagccattacaattccaattgacgcgcttaaatatacatcttcttcttcgattacaaaatattcactaatgttttttaatatgctttttgcaacttcctctacatattctttcgttatattttctatcaacataacaaattgatcatcgtgttctctaaataagtgcatatcttctatttttagattacttaaacattctgtaactttttgtaatactttatctccctctttatgaccaaatgtatcattaatacgatgaaactcatctaaatctataaatacaagtgcaaaatttacactctcatttaaaaaagtatttaacttatttgtacatgaaattctattcattaatcccgttaactggtcatagtaagctaaatattctgttcgcatttcgtttaatacttgccttgtaacatctctcgtaacaatataaatcccaacaatttcaccgttcacaataatcgggatagttctcaaagaaatatatagctcgtacccttctttatgaacatatttctttgaaacaatttgttttgcttttccttgcatcgatcccttaaatataatttgaaaatctttttcatattctttattaatgaattcaaaaataaatttattatttaattcctcataccggtatccaaatatttcatacgttgccggatttgcatatgtaactctccctatagaatctatagatataattgagtcattattatattccagtaacgacttaaataacatttgtttttcctctatctctgtcttctcctcaatttgagctgtaatatctcttgtaatacaaataacaaattgacatattccttcttcgtcgcagacaggattaagtgaagattcatagtgtatctcaccttttggtaaattgactacatcacaaaaggtgtgtgctttcgcttctctcactacttttgcatattgcctttgcaatatccccgctatatcttttggtaatacttctgcaaaggtttttccatagcactcttcgcttaacctagcataatccattcctattttattcacatacatatattgaaacgtttcattatcaataactttcaatatgaatactaaatcttgaatagcatgtaataatccttgtctaattaaatccatatctatcatacttaaaaaggtattttgattactatattcttccttcatatttatctcaacccgtcttatctatttttaatcatatatcccattctatatgattatgtcctctcttttaaatgtatgattatatattatttttattttataaaaaaaagtcgccatatggcgacttttaataaacgatttctaaatctaatccagggtaattttgttgacggaacgcttcataaattaaaattgctgctgtattagataaatttaatgaacgtactttatctgtcattggaatacgtaaacaatgatcaaagttttcttcgattacattagctggtaagccgtttgtttctcttccaaatacaaaatagtaatccttctcgcgcttgctatagtcaaacgctgtatgagctttctcgccatactttgttaaatagaagaattcaccgtctttatttttttcataaaattcttcaattgaatcataatacgtaattttcacgtgctgccaataatctaatcctgcacgctttaacattttatcatccgttgaaaatccaagcggtctaatcaaatgtaattctgttccagttgctgcacaagtacgagcaatattccctgtatttgctggaatttctggctgatataaaacaacatgtactcccacgcgatattcacctctgttttttgtctactacgtattataccacttgagcgaaaaatctctacccattaataatatgaaagaatttatatttcatttgtggtgtatatttactagagtcttcatagttccaataacgtcgacggctattcgctgaatgtgcatttacaagcggcataccatctgcatcttttgctactacaatcgtcgtatgattccatcttccgtcatcctcgaaatcataagcaatgacatctccaagaataagttcttctggcctctctaccgcctctgctcgaagtcctgttgtagcacctgacaaataccaataaaaagaatgtgcaacagcccagctccagctccactgattctccctttgccaccatcctttacgaatattaggatatccgctcataggtacttctccagtatgaagacattgagaaatgaaattcgtacaattatcagggaaattacgatacataggatttcggtcatcccaccaacgctctgcatatttcactgcctctaaacgattatactgataagaaccgtacttctctttcgtaatttccctttctaatgtctcacccattctaatttcttctgacacttcaatagcataatcgcctataattcgactattatttaaacaaactcttcgttttaattgttcctcttcaatataaaataattctttatgcttaattaaatatttaaaatgtatttgataatcaatttcttgatggtcattactatttaattgtctaatgaaagaaacatccgcagttgctttcactatatgtgcactacgtctttgaaacaattgtttctttctcagtgccatttgtagtaaatcctcagcaataccatccacattcgttcttttctccgttatatatgctaaaaattgttgtacttggttttcaatcttcgtttttacaaccattctgtctccctcccatattacaatatgaaaaagggaaatattatctactcttttttctgtgctaacaattcaagcccgcgattcatttcatgaagcacttcttcatctttctcacgttccatcgctttctcaatcgcttcgcctactccatctccgccaattttcccaagtgcccatgctgccgttccgcgtagtactggtcttgggtcatctttcataacaccaattaaatcaggaattgccgatgtttctttaaaatgtgctaatgctaaaatcgcatttctttgcagtggctttttccctctccatgatcctgacataatcccatatttctctttaaaatcacgattactaattgttaaaagtggtgttaataatggtttaactagctcaggatccggctccatctcaggatgattatgaaaatccattcctttgtttttcgggcaaacagtctgacacgtatcacatccatatatacgatttcctattttatcgcgatattcttcaggtaggaatcctttcgtctgtgttaaaaacgcaatgcacttcttcgaatctaactgtcccccctgtattaaagcaccggtaggacaaatatcgatacatttcgtacagcccccgcattgatcttctatcggcttatctggcgggaatggaacatttgtaatcatttcccctaagtatacgtacgaaccaaattcaggtgtaataatagagcagtttttaccgctccatccaatgcctgcacgctctgatacagctcgatcacttaattcacctgtatcaaccatggacttcacttctatatccggaagtttttcaattaaatatgcttctaatttttgcaaacgatctcgtaaaacaagatgataatcttgtccccaagaagcacgacaaaaaatcccacggcgttctccacgcttacttaatggtgcattttttaattttgaaggatatgctaaagcaatcgcaataattgatttagcacccggtaataacagttgcggattcgttctcttctctatatcaggctcttcaaatccagattgataatttaattgttgttgctggattaagcgctgctttaattcctcaaaaggagaagcactcgcaaagcctattttatctatgccaattgttttactatacgcaattacatcttgctttaattgttcaaaatccattcctaatcgcctcctcagatgaatccatcccttatgtaacgaccctattggttagtaattcacttttggaatactattatttacttctattttcgcatgtaattaggtttttcaaacattaaaaaacgcaatgcctcgtttatctcggaaacgaaacactgcgttgatcacaatttatagaaaaacatttaataaaatttggagcgggtgaagagaatcgaactctcgaccagagcttggaaggctcttgttttaccactaaactacacccgcaaatatgaattacatataagatattagaataacttatgtaaagtagtatagcatgtaaaaaaagtagaggcaagaattttatcgaaaaaagtcgaaaaagtgatgagagacctcatcactttttcaattctttatcaattgccttcttcatactatcgaaatcagggtttgcaagatttccgtttacatatacagaaggagcaccttgaacttttaatttttgagcacgatctgaatctttacgtactttttctttaatgtctttactgtgtaaatctttcttaaattgctctacatcaacttttggaagtttctctttcacaatgctaagaagcaaatcttctgtaatccattcttccgtatctttcttttgattttgataaatctcatcatagaaaatccagaatgaatctttatcttgtttataaattgcttcaccagctgctgcacctaaatccgagtcttttccgataaatgggaagttaataaaatataactgcactttgcctttatcaatatactcttcttttaatcgaggtaataccgttacatcccaagtacgacaagcaggacatttaaagtctccaaattcaactaccttaactggagcatcatctttccctaaagattgttgcgtagaataagcaaacatctcattccctttatcttttttgtcatttatgatgctatacgcaattgttccaattacaatcaatactgcgatagaaaaaactataccaagagccatgagtttatttgatttcatatacattcctctttaaattcatattctgtatacagcattgtacacaatacacataatatcaacacttatatacgtcacgcaatgaacacgctcacataaattacaaaaacacaataattgtgacgatattgtgtcacaatttgtcacaatttattcaaaaaaaagaagctcctctgtaggaacttctcttaacttactgcttttttacgcgcgctatttaacatcgactgctctatttttatatcatgacgaattactaatttctcactaactgcttgaacatactcatcatggcttatatagccttctttctccattagtctcaaaacgacatttcgtctctctactgctttatcatagttttgggcaggtgagtaataagcaggtgcttttactacagcagccatcattgcactttcagccaacgttaattggttcacctttttaccgaagtaaaggtttgctgctttttcaattccccatgctccttctccataataaatattacttacatataattttaaaatttcatccttcgtaaatgtgcgttcaatttttttcgtataaaaaatctctttccacttacgagaaaatgtacgttcatttgttaaaaaggcatttttagatagctgttgtgtaatcgtacttcctccttgcacgacaccaccagcctttatattctcaactgaggccctaataattgctatataatctaaaccgttatgatgataaaatcttttatcttctgtcgcaataaatgcatgtgttaatgattctggcacctctaacttagccggtacatgtaatttactaatatcacttttctcaatcattacatttccaacgaataataacgtacaacttaacaataataataatataatggctttataaaaaagtttagtcattggatttaatgcaactttttgatgatagttcaccctagataatactcgttctttcatcttgaacacctcttttccacacagcatataactcttactttaagaatacattgttgtaaaaaaatatcccatcgatttctcttacacgtaccttacatcattgtaaggtataaagtgaaactttaatgagccctcatcaatcaagcttactgcccagcaaatagtgggataaaaaagtattgtatcacagtatttttttatctactattcatctgaaatattgaatataggttatgttaaagcacgaataaccaataaaagagaaacccttaagactattatattttcactttacactttaattatatcatctacaaatatatatacttttgactatctagtaatctaaatgtatataacatatagatttattatacagaacaaatgttctgcaaatcaatactagtgctattattattttgacctttttcttaaacagtatacaaaaaagagtagtgattcgaatgtatctcaaatcggctactcttttctttacaatcttcctattaaattatacggctgtacttcccacgtttcatacggaataaaatgtgttgctctcattgcatcaagcgttctggatttcatatgaggacgcgttatatactcatctatgttctcttcatttaaatcaacaaatttacccacttgtatctcttcgggttgagtttttatttcaccacttatatatgctactttaaaaacaacagctagaatatgcatagaggtattataataaacccctgtaattccgataggcttcaccgttaaccctgtttcctcttttatttccctacagacagcttgatcgagcgcttcgccttcttctacctgtcctcctggcaactcccacgtatcagctcgccagtgcacttttgttaataacacttcatttttttcatttgttaaataacctgctacagcaactatatgctttggtgtcttatgttccatattaagcctcctagagataatgaatattttgtatatccctataatcatattcactacctacaacaaaatacctttaatacttcatcaccttaattaacttcataaaaaagaccctatccgctaagcgaaaagggtcatctatcgtattactctcctaagtctacgttgtgataaacttgttgaacatcttccaaatcttctaatgcatcaaccattttctcaaattgtgcttgagcatcttcaggaagtgttacatcactttgtgcaagcattgttaattctgcaactgtaaactcctcaacgccagcacctttaagtgcagattgtactgcatggaattgatctggttcagcatacacgataacagaatcttcttcttctagaatgtcacgtgcatctacatctgcttccattaaaatttcaagaacttcatctgatgttttaccttcaaggccgataacagctgtcgcatcaaacatgtaagctacagaaccgttcacacccatattaccactgtttttgctaaatgcagctcgtacatctgctgcagtacggtttacgttatttgtaagtgtatctacaataaccatagctccatttggtccgaatccttcataacgaagctcgtcataattttcttctgaaccgccttttgctttttcaactgcacgatcaataattgttcttggaacattgtatgttttcgcacgctctaatacaactcttagcgcttggtttgattctggatctggctcgccttgttttgctgccacataaatttcacgcccaaatttcgcgtatatacggcttgtatttgcatcttttgatgcttttttgtctttaatattgttccatttacggcccatactttccactctctttcccgttttaaatctacataaaaatattaatatgaaatataatgtgtgttcaacacatttttaaaagaaatataaaaagttcatttttgattcatattatagacataatataaatcactatcattttgttctttcgacaagttatattatacatgaattcctacgtttattacgaattttagaagcacatagtataatttaacaaaaagactctaacatttctgttagagtctttttatattgctgacacctattcccataattactttctattgttgtataataaaaatagggaaaaatttgaagaaaagagagaaggagaattatgacacattcaaatgagaaaaaagcacatagtcttaaagggatagaagaaaagttaaacccaactatctatcaagtgagattcatgaaattagatgaaccaattcaatttgagtcgttccctgaattaaaagatttaggggactggttaagtacttcaacgcatatgtgggcgtgccactcaactatgtataagtacaacagagaagggtttgaaaagaagtttttagagattacaaacttaaccgttgatagtgtactaatatctactggtggtatcggatttaacttcatgtcaccggggtggagaaattctctctagagtactcgaaagaaatattgtatatacaatactttttctgcttattttgtcatgtaatgaaaagaaaacaaaaaagctctatactaattgtatagagcttttttacgccgttcatgataccgatggtcggggtcgaaccgacactcccgaaggaacacgattttgagtcgtgcgcgtctgccaattccgccacatcggcacaaaagaaaaggcggcaaccggatttgaaccggtgataaaggttttgcagacctctgccttaccacttggctatgccgccatattaaattttattggagcggaagacgggattcgaacccgcgaccccaaccttggcaaggttgtattctacttcatttcaattaatggaaaaccgtagagtttctatccttaagttgatgggcatgtgtgaataccccaatatagtcaaactcgacttcgggatgtgttgcaagtgggacgatggaagacgataggcgatatagtgggatttcatgcgctatattgtaatgaaggatacgtattgtgtgctctaaattttgctttataacatggtacaggttgtcttctcgttcttgcttgctaagtttcttaaagcttgtaaacgtcattgttttggcaggagaacagtcccagagtgccattgcatgtgagacatatccaaaccgtataatcatatgagatacacctcttttattcattgtctttcctataaaaagaaagcaaatattgttccaatccattcctttcctctattgataagagaaggcgggtttacatcgctatatgaaagtacggatgcattctctagatcttcatgaaatttattttttactgtttgaatgaaatgtttattatataacaggcagtttatttcatggttaatatataaacttctcatatcaaagtttgccgttccgatatcacaaatatcatcgtccactataataattttggcgtgaaaaaacccttgttgaaatgcataaatattgcaaccagcctgtattaattttcggcagtacgggaattttgcttcccgaacgagagggtgatcagctttttctggaacaagaattgtgatttgaacccctctttctcttgcttttaataaggcattcataattttttttccaggaatgaaatatggcgtaccgatacagatttctttttttgctccgttaattaaatgtaaaaaagtatgctgtaaataagcaccatcagtcggaataaattgatgcaagatggtacctggttgttgttttggaaaataaagagaagcatccaataaattctgtttcgtatcatcaaaccaatcatgcaaaaattgcttttgtaaatcttgaaccccttctcctgtaagacgtaaatgatagtctcgccataatcctaagtgttcattatgccctagatactcttcgccaatattaaatcccccgatatagccggttttcccatcaatcactgtaatttttctatgatttctttgattggcagaaaagaaaggaagaggaaattttaccttatgacaaaatgaaaaagatacaccatgtttttgcagggagcgaatagcttcgtttgataaagaatggctgccaaatcgatcaagtaaaagtcgtacttcaattccttcctgagccttatcaatcagcaaatttaaaaattcacgactgattttatcgttttttacaatgaagaataaaatatgaatgtggtgctgtgcttgttttatatcagtaaataaagcgtcatataaatctttcccatatgtataaaggtgaaaatcactttgacgtaaagggaaagtgcgagagcttacctgttttaaatgaagaagtctcccgtatgaaaggtcaattgtaatccaaagagcaacggatattaacaaaagagataagtagagcatcagtgaattccctccttcgcattcttttcaccttcagtatgttacaaatgatacgggtagcacggctgttattataaatttctttagaggatagatgttgtactaattaaagtttcactttatcctgctttaacgggcagtaagcctttcacctcaaaaaatgttggataagtagaagttagttaggaaatcaactgcccgtaaaagcccgatgggttcaactaataatcagtgggggatgaaccacccctactgattaaagtttcactttatagtttcaccgaaataaacagctttatgaaaaaatgtgttgttctataacaaaaaactgttgactgaatgctcactcattatataatggggataggggatataattcagaaaattatatatttttgaagattcaaaaagaaagagggcttacaaagagaggggtagcataaaaatgaatagcttactgattattaattggctggctgccattgctgttattgcttatgcaggatatttgtttgtatatcttatacggacgagaatggcctacatacaattaggaaaaaaaattgagtttgaccgtcgttttaaagagcgttgggatctccttaaggtcaatgttttcggtcagaaaaagctgctgaaagataagaaaagcggcatcattcacgttatgttcttttacggatttattcttgtccaatttggagcaattgacttcgtttggaaaggactcgcaccaggatcacatcttccacttggaccactataccctgcatttacattcttccaggaaattgtcacacttgttattttaattgcagtattttgggcttttcatagacgttatgtagaaaagcttgttcgtttaaaacgtaacttcaaatcaggtcttgttcttatttttatcggtggtttaatgatttctgtgctacttggtaacggtatgggacttatatggcatggcgaggagctttcatggagtgaaccaattgcttctgcaatcgcttacgtttttagcgggataaatgaaaccgtagccatttcagtgttctatttttcttggtgggtgcatttactaattttgttaacgtttttagtgtatgttccacaatcaaaacatgcgcatttaattgcaggaccagctaatgtattcttcggtcgtctttcaaacccagggaagcttgaaaagattgattttgaagatgaaacgcaagaaacatttggtgttggtaaaattgaaaactttagacaaaatcaacttattgacttatacgcttgtgtagagtgtggccgttgtacaaatatgtgtccggcaacaggaacaggaaaaatgttatcaccgatggacttaattttaaaacttcgcgatcatttaactgataaaggagctgcggtaacatcaaaagcaccgtgggttccagtagttgccttcaataatacacaaggaaatcagttagcgatgatggcagctggaaaagggcaacaagaatcagcgtctacaacgctcgcttacgatccgagtttaatcggagatgttattacagaagaagagatctgggcatgtacaacgtgccgtaactgtgaagatcaatgcccagttatgaatgagcatgttgacaaaattattgacttacgtcgatatctcgttttgactgaaggaaaaatggacgcggaagcacaacgcgcgatgacaaatatcgagcgtcaaggaaatccgtgggggctgaaccgtaaagagcgtgaaacatggcgccaaggtgatgacgaagtaacagttccaactgtaaaagaaaaatcaaaagctggggaggaattcgagtatttattctgggttggttcaatgggatcatacgacaatcgtagtcagaagattgcgatatcgtttgcgaagttaatgaacgaagcaggcatttcattcgcaattctcggtaataaagaaaagaattctggagatacaccacgccgccttggaaatgaatttgtattccaagagatggcgacaaagaatatcgaagaatttgaaaaggcaggagtgaagaaaatcgttacgattgatcctcatgcttataacacatttaaaaatgagtatccggactttggcttgcaagcagaagtctatcatcatacagaattgttagctcagtgggtgaaagaagggcgcttaaagcctgttcacgctattgaagaaacagttacgtaccatgattcctgttatttaggaagatacaacgaagtgtatgaagcgccacgtgacattttgaaagcgattcctggagtgaatcttgtagaaatggcacgtaaccgtgaaacgggaatgtgctgtggcgcaggtggtggcttaatgtggatggaagaaacaacaggttcacgtattaacgttgctcgtacagaacaagcattagctgtacagccatccattatcggtacaggttgtccatattgcttaacgatgatcagtgatggaacgaaagcgaaagaggtagaagagaaagttcaaactcttgatgtgacagagattttagaacgatctgttatcggacagaaaaaagaagcgatgtagtttgtaagaatgtatacaactttagaaagaggtgcaatgattgcacctcttctcaacgtagggataccgagcgggcgctcagtgttaaaaaatgaaatgggggaaagaaacatgagtaaaacagttattttaagtgctgcaagaacaccagttggaaaatttggaggatctttaaaagatgtaaaagcgacggaacttggaggaattgcaattaaagcagcgcttgaaagagcaaatgttgcggctagtgatgttgaagaagttatatttggaacggttattcaaggtggacaggggcaaattccatcgcgccaagctgcaagggccgctggaatcccatgggaagtgcagacggaaacagtgaataaagtttgtgcatcagggcttcgtgcggttacgttggcggatcagattattcgtactggcgatcaatcactaattgtagctggcggtatggagtcgatgagtaacagtccttacattttacgcggagcaagatggggatacagaatgggcaataacgaagttgttgatttaaacgttgctgacggtttaacatgtgcattttcaggtacacacatgggcgtttatggcggagaagttgcgaaagaagatggaatttctcgcgaagcgcaagatgaatgggcatatcgtagccatcagcgtgcggtttcagcgcataaagaagggcgttttgaagaggaaatcgtgccagtaacgattccgcaaagaaaaggcgatcctattgtcgttgcaaaggatgaggcgccacgtgaagatacaacgattgaaaagttagcaaagttaaaacctgtatttgataagacagcgacggtgacagctggtaatgcgccgggactaaatgatggtggtgccgcacttgtattaatgagcgaagacagagcgaagcaagaaggaagaaagccattagcgacaattttggcgcatacagcaattgcagtggaatctaaagatttcccaagaacgccaggttatgcaattaacgcattgcttgaaaaaacaggcaagaaaattgaagacatcgatttattcgagattaatgaagcatttgcagcggtagcaattgcaagtacagaaatcgcaggaattgatccggaaaaattgaatgtaaatggcggcgcggtagcgatgggacatccaattggagcaagcggagcgcgcattatcgttacactaatccatgcacttaagcagcgcggcggcggaattggaattgcttcgatttgtagcggtggcggtcaaggggacgcagtgatgattgaagtccactaattaaagttcgagggtataaaatttattaacaattaagggggaagaaaaaatgggtgtacaaaacattgttgtaattggtgcagggcaaatgggatcaggaattgcacaagtatgtgcaatggcaggatatgacgtgaaggtacaagatttaaagcaagagcaattagatagaggaatggctatcattacgaaaaacttagcgcgccaagtagaaaaaggacgcatgaaggaagaagagaaggaagcgacattaaatcgtcttacagtaacgcttgatttagattgtgtgaaagaagcggatcttattattgaagcagctgttgagaaaatggatattaaaaagaaaatctttgcgaatctagatgaaattgctccagaacacgcaattttagcgacgaatacgtcatctctgccaattacagaaattgcagcggtaacgaagcgtccggaaaaagtaatcggtatgcactttatgaatccagttccagttatgaagcttgttgagattattcgtggtttggctaccgatgatgcggtatatgaagcaattgaagatattacgaaaaaaattgggaaagtaccagttgaagtgaatgatttcccaggttttgtatcaaaccgcattttactaccgatgattaacgaagcaatttatacgttatatgaaggtgtagcgacgaaagaagcaattgatgaagtcatgaagcttggtatgaaccatccgatggggcctttgacactcgctgattttatcggtttagatacgtgtttatacattatggaagtgttgcatgaaggattaggagatagtaaatatcgcccatgtccattattacgtaagtatgtgaatgcaggatggttagggcgtaaaacaggtcgtggattctacgtttacgaataaatgccccctttgttacaacatagtggtcttaccaaattatttaaaggatatatagcaaatggaggcggaatatatgaactttcgttttaatgaagagcagcaaatgatgaggaaaatggttcgggattttgcacagaaggaaatagctccctttgttcctagtatggaacaaggggtgttcccgaaagagattttgcaaaagatgggtgagcttggattaatgggtattccagcgcctgcaaaatacggcggggcagaaatggactttatttcttacattctagcaattgaggaaatctcaaaggtaagtgcaacagttggtgtaattttagctgtacatacgtcagttggaatgaatccgattttatattttggaacagaagaacagaagaaaaaatatgtttctaaacttgcaaccggggaatatttaggtgcatttgctttaacagagccaaatgcaggatcagatgcagggagtttgaaatcaagagctgtgaaaaaaggtgatcattatattattaatggatcgaaagtgtttattacaaatggtggtgaagcaagtacatacattgtattcgcttctacaaatccagaggcaggaaaaagtggtatttctgcatttatagtagagaaagatacacctggtttaatcattggaaaagatgaacataagatgggacttctcggttctcgtacagtacaacttacttttgaagatatgaaagtgccagctgagaatttacttggggaagaaggacaaggattcaaagtggcgatggcgaatttagatgttgggcgaattggaatcggtgcgcaggctttaggaattgctgaagcggcgcttggctgtgcaattgattatgcaaaagaaagagagcaattcgggaagccaattgcggcgcagcaagggattggcttcaagcttgcagatatggcaacaagtgtcgaggcagcaaggttactcgtatatagagcggcatctcttagggcacaaggattaccatgcggtaaagaagcatctattgcgaaattatttgcttctaagacagcggttgaagtcgcgattgaggcggtgcaagtatttggtggttacggttatacgaaagactatccagtagaacgatttttccgtgatgcgaaaattacgcaaatatatgaaggaacaagtgaaatacagaaacttgttattagccgtgctttataaaagggcgagggggagacggagatgcattttaaactatcagaagaacatgaaatgataagaaaaatggttcgagattttgctaaaaatgaagtggcaccaacagcagctgagcgtgatgaagaagagcgatttgatcgagagttatttgatcaaatggcagagcttggtttaactggtattccatggcctgaagagtacggtggaattggaagcgattacttagcatacgtaatcgctattgaagaattatctcgcgtttgtgcttcaacaggtgtaacactgtctgcgcatacttcacttgcgggatggccaatttttaaatttgggacggaagagcaaaagcaaaagtttttacggccgatggctgaagggaagaaaattggtgcatacggcttaacggaaccaggatctggatcggatgctggtggaatgaagacaatcgcaaagagagatggcgatcattatattttaaatggatcaaaaattttcattacaaatggcggtattgctgatatttatgttgtttttgcgctaactgatcctgaatcgaagcagcgcggtacgagtgcatttattgtagaaagtgatacaccgggattttcagttgggaagaaggagagcaagctagggattcgctcttcaccaacgactgaaattatgtttgaagattgccgtattcctgtagagaatctacttggaggagaggggcaagggtttaaagttgcgatgcaaacattagatggaggtcgtaacggtattgcggcgcaagctgttgggattgcacaaggggctttagatgcttctgtagaatatgcaagggagcgccatcagtttggaaaaccaattgcggcgcagcaagggattggctttaaacttgcggatatggcaacagatgtagaagcagcacgccttttaacatatcaagcggcttggcttgaatcagaagggcttccgtatggaaaagaatcagcgatgtcaaaagtatttgcaggcgatgcagcgatgaaggtgacgactgaagcggtgcaagtatttggtggttacggttatacgaaagattatccagtagagcgttatatgcgagatgcaaagattacacaaatatatgaaggaacacaagagattcagaggcttgtaatttctcgtatgttaacgaagtaggaacgaaagcgtaggtattttcctacgctttttccttccaaaaaataatagagagaggtgaagggaatggttaaacataatgtgcatgcatcggtgaaagatgaaaaattagttgcgttaagacgtgaacaaatgattaaaggtgcggtgcaactgtttaaacaaaaaggatttccgcgtacaacaacgagagagattgcaaaagcggctgggtttagtatagggacactttatgagtacattcgtaccaaagatgatgttttatatttagtttgtgatagtatatatgaacatgtaaaagaaagattagaggaagtagtgtgtacagaaaaagggagtatagaaagtttaaagatagcaataacgaattactttaaagtgatggacgaattacaggaagaagtattgataatgtatcaagaggtacgctttttaccgaaagaatcacttccgtatgtattagaaaaggagtttcaaatggtaggaatgttcgagaatattttagaacagtgtacggaaaatggaacatttacattaaataaaaaagaaatacagcttcttgcgcataatatttttatacaaggacagatgtggggatttagacgctgggcgctgcaaaaactgtatacgctcgaagaatatacagaaatgcaaattaggtatgtattgcaaggggcccatatgcttccgaaataaggaacagacaaattataattttactaccctataaaagtttcccgttttttttgtagcatatttgtgcgacttttgtttataatgaatagtatggatttttttaagcaggccgttatatataaggttatatttgatgaaaggaagtgccgcataagtggattttaagcaatattcaccagaagagctaaaagaatgttcaatgattgaagttgtacatagcgttttaggggataaaaaacaagcaacgacattcaacgagttggttcaagaaatcgctcaagtgctgggactatctcaagagcaagttaatgcgaaaatcgcacaattttatacagacttaaacatcgatggacgtttcattaatttaggagaaaatcgttggggactacgcagctggtacccatatgagcaaattgatgaagaaatcttgcctcaaccaaaaccgaagaagaaacgtaaagttgaagaagacggttttgacgactacattgaagaagacgaagatgacttcgacgatgcagacgtaagtgaagatgaagacgatgtagaagatttggacaaggttcttgaagaagaagacggagatgacgacgatcttgatgatttagacgaagatgacgacgacttcgctgaagaagaacttgagtatgatgaaactgaagaagaagaagaggaagaactgtagttcttgacttttcattatcgtccatgtagaatcatttttgggctctttaaaaaaggacgataatacttttaaagtgtaaatataaaagaaaattgctccctacttattactttttgtgatgaggggagcaattttcttttttgttttttgtttagaaaataaaaagagtctaacaataagatggatacagtgttatctacatacgttgcgctttgcaacggtgattatataacagcaaaatagaagggagctttttcatgactaagtatatttttgtaacaggcggtgtagtatcgtctttaggaaaaggtattacagcagcatctcttggaagacttttaaaaaatcgtggtttaaacgtaacgattcaaaagtttgatccatacattaacgtagacccagggactatgagcccataccaacacggtgaggtattcgtaacagatgatggcgcagaaactgacttagaccttggtcactatgagcgtttcatcgacattaacttaaacaaatacagcaacgtaacaacaggtaaaatttactcttcagttcttcaaaaagagcgtcgcggtgaatatttaggaggaacagttcaagttattcctcatattactaacgaaattaaagaacgcgtatatcgttctggtcgtgaaacaaatgcggatgttgttattacagaaatcggtggaactgttggtgacatcgagtctctaccattcttagaagcaatccgtcaaattaagagcgacatcggtcgtgacaatgtaatgtacattcactgtacgttaatcccgtacttaaaagcagcgggtgaaatgaagacaaaaccaacacaacatagtgttaaagaacttcgtagcttaggtattcaaccaaacattatcgttgttcgtacagaaatgcctgtttctcaagatatgaaagacaagcttgcattattctgtgacatcgatacaaaagcagttatcgaagctcgcgatgcagatactttatatgcggttccattatctcttcaagaacaaaacatggaccaaatcgtttgtgaccacttaaaattagacaatccagctgcagatatgacagagtggattgcgctagttaacaaagtgcgtaatctttctaagaaaacaaaaatcgctcttgttggtaaatatgtagaacttcaagatgcttatatttctgttgtagaagcacttcgtcatgctggttactcattcgacacagatgtagaagtaaaatgggtaaatgctgagcacgtaacagcagaaaacgtaaaagaattagttggcgatacagatggtatccttgtaccaggtggcttcggcgatcgtggtgtagaaggtaaaatcgttgcgattcaatatgctcgtgaaaacaaagttccattcttaggaatttgcttaggtatgcaacttgcatcaatcgaattcgcacgtaatgtattaggtttagaaggtgctaactcttctgaaatcaaccctgacacaccatatgcaatcatcgacttattaccagaacaaaaagatgtagaggacctaggtggtacacttcgtcttggtctatacccatgtaagcttgctgaagaaacaaatgcttacaatgcttataatgagccggttgtatatgaacgtcatcgtcatcgttatgagttcaacaaccagttccgtccggatatggaaaaagaaggatttgtattctctggtacaagcccagacggccgtctagttgaaatcattgaattaaaagaccacccttggttcgtggcagcacagttccacccagaacttgtttctcgtccaaaccgtccacaaccattgttccatgacttcgtaagagcttctattacgaataaagagagcaagtaataaaaaaagcgcctgaaataaggcgctttttttaatattcatttaacatttcatcgattgtaaatttgattccgtgataagcaaataaagctactattaaacttgggaatccgtagcgattaccttcatcgtctggaataagaccttttaacagttttgtatcaatatgtacgtctgtatatcgttcgagtgattccgtaccttcttgaagagcagaaatgccgacaatagagtgtccctcttcttgtagtttttttgcaatttctacaaccgcttcatctgttgaaaaacggctaataagaagtacacgatccgcagaggttacttctgcttctttaccattttcaaataagcgttttgcttgcttcattggttcagcaccgaatagtgcctcggcaacaacgccttccatttcatttgtaccatgtaaataaatgaaaccatcgccaactagtgcttgagcaagtaaacgagcactatcttctatattcatttcttctttttgagaaactctggagaaataaccacttaattgagttgaaaaaatttttaacataatgttactcccttcgtacgtgtttgccggctttcattatagtttatttttttagaaaggtgaaatcgtagggtagcataacaaaataggaaacggtaaaataagaaagaataggaaggaatttgccaaagaatagcgaaaataaatcgttaagatataagaagctttaaatcttgtacttacacagaaaggttgggaattatggaaggtaaaattttaatcgttgatgatcaatatgggattcgtgtgctattacatgaagtgttccaaaaagaaggttatcagacattccaagcagcaaatggatttcaagctttagatatcgtgaaaaaagataatccagatttagtagtgttagatatgaaaattccaggcatggatggtatagagattttaaagcatgtaaaagaaattgatgagagtattaaagtaattttaatgactgcttatggagagcttgatatgatccaagaagcaaaagatttaggtgctttaatgcattttgctaaaccatttgatattgatgaaattcgtcaagctgtgagaaatgagctcgctgtagaggcgtaaaaatgaattttttataaaaaatatggaaaaaagcgtttacatggactattgtgcaggtgaatacggttgagtttttgagtacaagttgttatcctattgagtgtagaaaaaagtccggtatgtagatatacatattttaccttattctggtcatactaccagcgataagaacttatcggatacaaaaaacgttttttaggaggattcaccatgcctttagtttctatgaaagaaatgctaaacaaagcactagaaggaaaatacgcagttggtcaattcaacatgaacaacttagagtggactcaagctatcttagctgctgcggaagaagaaaaatctcctgtaatcctaggtgtatctgagggtgcagctcgtcatatgactggtttcaaaacagttgtagctatggttaaagctttaatcgaagaaatgaacatcactgttcctgtagcgattcaccttgatcatggttcaagcttcgaaaaatgtaaagaagcaatcgatgcaggtttcacatctgtaatgatcgacgcttctcaccacccattcgaagaaaacgttgaaactactaaacaagtagtagaatacgcacacgctcgtaacgtatctgttgaagctgagcttggaacagttggcggacaagaagacgacgtaatcgctgaaggcgtaatttacgctgacccagcagagtgtaagcaccttgttgaagcaacaggtatcgattgcctagctccagctttaggttctgtacacggtccttacaaaggtgagcctaacttaggattcgctgaaatggaacaagttcgtgacttcactggcgtacctttagtattacatggtggtactggtatcccaactgctgatatcgaaaaagctatctctttaggtacttcaaaaatcaacgtaaacactgagaaccaaatcgagtttacaaaagctgttcgtgaagtattaaacaaagaccaagaagtttacgatcctcgtaaatttatcggacctggccgcgacgctatcaaagcaactgttattggtaaaattcgcgaattcggttctaacggtaaagcgtaagaataaaattccgttttggaaaccgtctagtcttttagacggtttcctttcgttgtataatgaaagcgtgaacaagtctaaagattttatcatttttggtttttaaatagaaaataatgtgcatagtcctattaataaatgtgataacgtatctaaattgataaagtgaattcgatgaatagttgatctttatctattcgtgctacaggagaaatgaagataatggtttcctatttattgagttttgggatggaaagagtaattgagattcttaaggggagctttctataaaaagatagaaagtaaatacattcacaagaagggagctcaatatggaaaaattgctaattgaaggcggaagagctttaaatggaacaattcgagtaagtggtgcaaagaacagtgccgttgcattaattccagcgacaattttagcagatactccagtaactattggtggtgtccctaatatttcggacgtgaaaatgttaggagacttactagaggaaattggagggaaagtaacttatggacaggaggaagaaatggtagtcgatccttctaacatggttgcaatgcctttgccaaatggaaaagtgaaaaaattgcgcgcttcttattatttaatgggtgcaatgcttggccgttttaaaaaagctgttattgggcttccgggtggatgtcatttaggcccgaggccgattgatcagcatattaaagggtttgaagcgctaggtgcacatgttacgaatgaacaaggtgccatctatttaagagcagatgagctacgcggggcacgtatttatttagatgttgttagtgtaggagctacaattaatattatgctagcagctgtacgagcaaaaggtagaactgttattgaaaatgcagcgaaagagcctgagatcattgatgtagctacattgttaacaagcatgggagcccgtattaaaggtgctggtacagatgtaatccgaatagatggtgttgactctttacatggttgtcaccatactatcatcccagatcgtattgaagctggtacgtatatgattctaggagctgcatcaggaggagaagtaacggttgataacgttattcctcagcatttagaatcagttactgcaaagctaagagaagctggtgttcaagttgaaacgaacgatgatcaaattacggtgaacggtaatagaaagttaaaagtagttgatatcaaaacgcttgtatatccaggttttccaacggatttacaacagccgtttacgacgcttttaacaaaggcgcacgggacgggagttgtaacagatacaatttacggtgcccgtttcaaacacattgatgaattacgtcgtatgaatgctcaaattaaagtagagggtcgttcggcaattgtaactggtcctgtgttactgcaaggtgcaaaagtgaaggcgagtgatttacgagcgggagcggcacttgttattgcaggtttaatggcagatggaattacagaagtaacaggacttgagcatattgatcgaggttatgagaatatagtggacaagcttaaagggcttggagcaaacatttggcgagaacaaatgacaaagcaagaaattgaagaaatgaagaacgcataagtgatacttccgcaagggggaagcgaagcatcactacttgcggaagtacactttatagaaaaacacggttcacaaaatagggcagaaatataaagacttaaaggagagggattatcgtggaaagaagtttatctatggagttagtacgtgtaacagaggctgcagctttatcatcagcgcgttggatggggcgcgggaaaaaggacgaggcagacggtgcagcaacatcagctatgcgtgatgtatttgatacaattccgatgaaaggtacagttgtaattggtgaaggtgagatggatgaagcaccaatgctatatatcggagagaaattaggtacaggatatggaccacgtgtagacgttgcggttgatcctttagaagggacaaacatcgtagcagctggtggctggaatgctcttgctgttattgcaattgcagaccacggtaatttgttacatgcccctgacatgtacatggataaaatcgcggttggcccagaagcagtcggggcggtcgacattgatgcgcctattattgataacttacgtgcagttgcgaaagcaaaaaataaagatattgaagatgttgtagcgacagttttaaatcgtccacgtcatcaagaaattatcgaagaaattcgtaaagctggtgctcgcattaaattaattaatgatggagatgtagctggagcgattaatacagcgtttgatcgtacaggtgtagatattttatttggatctggtggagcacctgaaggtgtattagcagcagttgctttaaaatgtttaggtggagaaattcacggaaaactattgccacaaaacgaagctgaattagcacgttgtaaaaaaatgggcatagaagacattaatcgtatccttcgtatggaggacttagtaaaaggtgacgatgcaatctttgcagcaacaggcgtaacagatggagaactattacgcggtgttcaatttaaaggtagcgtaggaacaacgcaatcccttgttatgcgcgcaaaatcaggcacagttcgcttcgtggatggacgtcatagcttgaataaaaaaccaaacttggttattaaataaaaagcgtaagcagctcgttcagaaaggttaaaatggtcgacttttctaactatcggagctggaactaaattaaataagaagcgaagacaaattttcttgtcttcgcttcttgtatttgtgttccaacgtattgattaaaactagataaaagggttacaatagtgaatattaccctacttgaacttattgcctttcattattaattatttgccttccgtattttttccctttacccatgaaaaaagagaataacgttaaagtgtggtgtctgaatgaatttgtcaattgcagcattagaaaacatgaaattaaaagagttatacgagcttgcgaaagaatttaagatttcgtattatagcaaattaacgaaaaaagagttaattttttctattttgaaagctcgagcagaaaaagaaggtttctttttcatggaaggcgtattagaaattattcaatcagaaggatttggattcctacgtcctatcaactattctccaagctcagaagatatttatatctcagcttcgcaaattcgtcgtttcgatttacgtaatggagataaggtttctggtaaagtacgacctccgaaagaaaatgaacgctattttgggttattacaagttgaagctgtaaacggagatgatccagattcagcaaaagagcgtgtgcatttccctgcattaacaccattatacccagatcgccaaatgaaattggaaacggaacctaaaaagttaccgacacgcatcatggatttaatcgcaccagttggatttggacaacgtggtttaattgttgcgcctccaaaggctggtaaaacaagtctattaaaagaaatcgcgcatagtgttacaacaaatcatccggaagcagaattaattgtacttttaattgatgagcgtccagaggaagtaacagacattgaacgttctgttaaaggagatgttgtaagttctacttttgatgaagtgccagaaaatcatattaaagtagctgagcttgtgttagaacgtgcgatgcgtcttgtagagcacaagaaagatgttatcattttaatggatagtattacccgtttagctcgagcttacaacctcgttattccaccaagtggtagaacattatcaggtggtatcgatccagctgccttccatagaccgaagcgtttctttggagctgcgcgtaatattgaagaaggcggtagcttaacaattttagcgacagcccttgttgatacaggatcacgtatggacgatgttatttacgaggaatttaaaggaactggaaatatggaacttcacttagatcgttcattagctgaacgtcgtatcttcccggcgatcgatattcgtcgttctggtacacgtaaagaagatctattaattccaaaagaacatttagacaagttatggggcattcgtaaaacaatgcgtgatacaccagacttcgttgaaagtttcttacgtaagcttcgtcaaacgaagacaaatgaagagtttttacaaaacattgttgcagactcaaaaaggtatgtaacaactaagtaaagggaaaaaatcaggactcgcttattttatagtaagcgagttttttatgctgtttaggtgatattaaagagagaaataagtgagagaaccttagccagtcagagctaaacgagccgtctccactttaagataatatcgagctccagcggctaaaatctccggtcattttgctctctcgcatgaagcaaaaagcgcttcagggtcgagagctccaatgccctgcgattttgaacgagccgtctccactttaagataatatccagttccggtggctagctcttcgcatctaagaaccttccgcccaaaaggtaaaaagcacctttaggtcgaaagaaccttagctggtcagagctgagcgagccacctccactttaaatttaatatccagctccagcggctagaatggttggtggcttcgcgtcttcctacgaggcaaaaagcgcctctacgtcagaagctccatccccctcccattctgaacgagccgcttgcgcttttaaaattaaaaagacaaaaacaggtagttgcaaaatgaagttagccttgttataatttcatcatatgtgtttcatcaatatagttgtgtatgcagctgaagatgaaaaactctgtttcgaaaatgattcagggcggaaggagatgaaaagaatgaaagcaggaattcacccagattacaagaaagttgtattcatggacacaaacacaggcttcaaattcttaagcggatctactaaaggatctaacgaaactgttgagtgggaagatggtaacacttatccattactaaaagttgagatcagttctgattctcacccattctacactggacgtcagaagtttgctactgcagacggacgcgttgaccgcttcaataagaaatacggtcttaagtaataaaaacataaaacaggcaagtgtatgtattcgcttgtctgttttttttgcgaaaatattatacctttaccctacttttaactgaaaagtagatgaaaggagagcttcatgtacttaataaatcaaaatggctggattgaagtgatttgcggtagtatgttttctggcaagtcagaagagctaatccgccgtgtgcgccgtacgcaatttgcaaaacaacatgcaattgtatttaaaccatgtattgataatcgatatagtgaagaagatgtagtatcacataacggattaaaggtaaaagcagttcctgtttcagcttcaaaggatatatttgaacatattacagaagagctggatgttattgcaatcgatgaggtgcaattttttgatggggacattgtggaagtggtgcaagtattggcaaatcgtggctatcgtgtcattgtagctggtttagaccaagatttccgtggtctaccatttggacaagttcctcagctgatggcgattgctgaacatgtgacaaaactacaagcagtatgttctgtatgtggatctccagcaagtcgtacacaacgattaattgatggagaaccagcggcatttgatgatccaattattttagttggagcttcagaaacgtatgaaccgcgttgtcgtcattgtcatgcagtacctgcaaacaaagataagtaaaactcgctgcgcaaggcgggtttttttcaaaatagagagaatgagcggtgtgagccgcttacgcttttaaatatatctagttctggtggctagctcttcgcatctaagaaccttccgcccaaaaggtaaaaagcacctttaggtcgaaagaaccttagctggtcagagctgaaagagccaccgccacttttaaatataatttgcgtttttttgagtaagtaccatatactatttgtattagatactaggatgtagaggtgaatgatgtgttagatcgtttgcaagctgtagaaaatcgttatgagaagttaaatgaattgttaagtgatccagcgattattagtgattcaaataagcttcgtgaatattcaaaggaacagtctgatatacaggaaacggtagaggtgtatcgtgagtataaggatgttcgtgagcaattaaaagatgcgaaagcaatgttagaagataagttagacgcagaaatgcgtgaaatggtaaaagaagaagtttctgagttagaatcacaagataaaacattatcagagcgtctgaaaattttacttgttccaaaagaccctaatgatgataagaacgttatcgttgaggttcgtggagctgctggtggagatgaggcagctttatttgctggtgacttataccgtatgtatagccgttacgctgaggtacagggctggaaaacggagattattgaggctagctatacagagttaggtggatataaagagattatctttatgattaatggtaaaggtgctttcgcgaagctgaaattcgagaatggtgctcaccgtgtacaacgtgttcctgaaacggaatctggtggacgtattcatacatctacagcaacagtagctgtattaccagaggcagaagaagtagaaattgatattcatgagaaagatgttcgtgttgatacattcgcttctagtggacctggtggacagagcgttaatacaacgatgtcagcggtgcgtttaacgcatttaccgactggtgtagttgtatcttgtcaggatgagaaatcacagatcaagaataaagaaaaagcgatgaaagtattacgcgcacgtgtttatgataagtttagacaagaagcgcaagctgagtatgatcaaaaccgtaaacaagctgttggtacgggagatcgttcagagcgtattcgtacgtataacttcccgcaaaaccgtgttacagaccatcgaatcggtttaacgattcaaaagctagatcaaatcttacaaggtaagttagatgatttcatcaatgccttagtgatggaagatcaggctcaaaagatggaggcagctgagtaatgcgtgtctatgaagccctgaaatgggcttcttcttttttacaggaaaatggacgagatgaaaatgcgggagaaattgtcctttgtcatgtattaaaggtgaacagaacaggattacttatgaatatgcgtgaagaaataactgaggatcaagagaaaagctttacggagtttatccacaagcatgtagaaggtattcctattcaatatatgattggttatgaaatgttttatggacggtctttctttgtgaatgaagaagtattaataccaagaccggaaacagaagagcttatagtgggagtattagaaagaatcgagcgccattttggtgatgagaaactacatgtagcagatataggtacaggtagtggagcgatttctattacgcttgctttagaaaatgaaaatcttcatgtgtatacagtagatattgcacaagagtcgattgaagttgcaaaagaaaatgcaaaagctttaggtgcagaagtaacgttctatcacggtgatttattgtcaccatttcataaaacgggtcaaaagctagatgttgttgtttcaaatcctccatatataccggaagaggattggcgtggtctttctcctgttgtgaaagagcatgagccgaagagagcacttgttggtggtgaagacggattagatttctatcgccgttttatggaagaattgccgaatgtgttgcagaagaaagcgattgtggcgtttgaaattggagtaggacaaggtgaggatgtaaaaagattgttacaacaagcttttccacatgctcatgttgaggttgttttcgatattaacggaaaagatcgtatggtatttgcagagatggagtaaggttcacaccttactctatttttttgtggaaaaattcatatagattttgaatttaatagtttagaaagatgaaagtctgtccacactgtttgtagaagggacggtggaggaaatgaaaaaacaagttattgcttatcttcttatactattaattggtgcacagttacttgtgcagtttggatatatgaaagctgatgcgaaagggccttcagttattccgaaagaggccgttcgattacgaattttagcaaatagtgattcagataaagaccaggcattaaagcgtaaagtgcgtgatgaagtaaaagcacaaattgatgggtgggtagcggatttaacttcatttgaagaggcacgcaaagtaattcaaagtcatattccagaaatcgagaaaacggtggaaaatacgttaaaaagagaaggaagtaaagattcatttcaagtgaaatttagtaagaatgtaaagtttcctacaaaggtatacgggaattttatttatccagcaggagaatatgaagcagtattaatcacaattggagaaggtgaaggggcgaactggtggtgtgtattatttccaccaatgtgtttcttagatttttcgagcgggacagctgtaagaaaagaagagcacgttgtgaaggcggaatctcctgaagaggagcaggtgaaacaactagatgaggaagtaatagataaagaagagaagaaagtagataaggtaaaagaaacgaaagctgtaaagcaggaagtagtaaaaaaagtaacagcttctgaaaagaaagtagtaaaaaatgaaacaaaagtcgaagagcagcctgtaagtaaagaagaaataaaaactgtgggaaaagtggagaaacctgtggagaaaaaacaagaaaagcaaaatgagtatgtaaaagtagaagaggaagaagaaaagccagaagttaaattgtttattgtagaagcttttacatctttattctctaaatagtactattaataaatccctcttcatatataaaaatgaggagggatttattatgaagaaagtgtattttgctacgaaagcagatgtggaaagattacattcttttttcggacaagctaataaaaaagatgataaaataaatgagttgtacgcacaatttatgattttggaagaggcggaagaaatacgagctgtaattggttatgaacgaagtggggaagatgtgcttattcgttcttgtttattcacacctcatgtggataaacagactttcttatatttttttgaaatgtttttgcagtatatgaaagaaaaaagtgttcaacaattgtacttactaacaaatcatccacaatctgtaccgatctttcagttttttgacttttttactatagaaaaggatgaggttccagagggaattcaacaactagaacatttttgtaaaaatataaaagagcagaatgcaataatactaaattgtcagctattcacaaagttatccacggattaattaggtttatccacattttgtggataaaccttgtttgtcttttggataaatctcatagtaaactaaaaatatacaagtatttaagggtagaaaaggacgtggaaaaaaatgcatacaaacatgtgggttgtggataatgttgtggaaagaaaaaaatattatccacagttacaagaagcagcaaaattattaagagaaaatgaggcggttgctttccctacggaaacagtatatgggttaggtgcaaatgcgatggatgatgaagcaatcgcgaaaattttcgaagcgaaaggaagaccgagtgataatccactcattgtccatataggtacaaaatctcagttagatgggattgtgaaagaaattccaccagttgcagagaagttaatggcgcatttttggccaggaccattaacaattattttgccgagaaaagaagggatttcagagaaggtgacggcaggacttaatacggttggagtaagaatgcctgatcatccaattgcacttgctcttattgaagaggcgaatgtacctgttgcggcaccaagtgcgaatcgttcagggcgtccaagtccaacattagcttctcacgtatatgaagatttgaatgggaagattgcaggtattgttgatggtggtgcaactggagtaggcgttgaatcaactgtaattgattgtacaagcgcggttccaacaatattacgtccaggtgggattacgaaagaacaattagaagcggtgataggtactgtttctttagatccagctttaaaggatgagaaggaaaaaccgaaatcgcctggaatgaaatacacacattatgccccgaaagcaccacttagtattgttgagggctcacgtgagtttattcagcatcttgtggatgagaaaaaggaagaaggatttaaagtaggcgtattaacgacagaagagtatcagcatgtatatagtgcagatgttatattatcttgtggtgttagaagtgacttagctagtgttgcgactaaattatatgatgtacttagaacatttgatgcaagtgaagtggatgttatttttagtgagtcattccctaatgaaggaatagggaatgcaattatgaatcgtttaacaaaagcggcaggacatcatattattattgaatgataaggtaagattagcaaacagaatatttctccttggataagcatattgtgaagtagcacgtccaaggaggggcatgaatgacgtttgaacagctaatacctttaataattatggcattcgccttagggatggatgcgttctcggtgagtcttggtatggggatgatacccctaaagttaagacaaatcctgtatattggtatgacgatagggatatttcatattattatgccgtttataggaatggtactaggtcgttttttatcagagaagtatggagatatcgcacattttgcgggtgctattttattaatcggactagggttttatatcgtatattcgagcattttacaaaatgaagagactagaacagcccctattggaattagtttattcgtatttgcatttggcgtcagtatagatagtttctcagtaggacttagtcttggtatttatggggcacaaacaattattacgattttactttttggatttgttagcatgttattagcgtggatgggtttattaattgggagacatgcgaaagatatgctcggtacatatggtgagatagtaggtggtatcattttggttgggtttggattatatatcctttttcctatataattttatgtaggagggaattatgaacaagctattggaatggtatgttaaatttttgaccttctatcctcgatggctaagaagacttataatttggggtattattttgcaaatttcgatgttaggttggattaagttaattcgtgaatggtgagatagttcctttctgtgaatattttgtttgtactatatttattgcgctaaaaattacagatatagaaaggatgagatgaatgacgagattgaagcaagtttttggtattattattagtttttttgttttttggtttagtatgctcggtgtacaaatgtttgctgagtttttagatattgagtcattgaaatttgttgcgggaaagactgaggcggcgcgtgccttttactctccgtacccgtttttaattgtttttcttattacattgctttccctatacttcttcgtaattaagctagggaagccgaaaaaagagaaaatgcctactttagaggaaaagaaggaagaattacaatgagaaaatcccctgctaaaaagcaggggattttatatttgagtgatgggaggaatctagccgccttgcttttaaatatatccagctccagcggcaagctcttcgcatgaagcaaaaagcgcttcaaggtcgagagcttgaagtgtcctgcgattctgaacgagccgcttccgcttttagatattatccagttccagtggccagctcttcgcatctaagaacctcccgcacgaaaggtaaaaagcaccttttgtgcgagagaaccttagctggtcagagctaaacgggccacttccacttttaaatattatccagcttcagcggctagaatctccggtcatttcgctctctcgcatgaagcaaaaagcgcttcaaggtcgagagcttgaagtgccctgcgattctgagcgagccgcttccgcttttagattggcctaaccaattcaaattgttctcctaattttgcatagttgtgtcctgctaggcggcttattggtttgagtccttcggcgtgaatgcgccctttttcatatagatgttcggcaacgtggaaacgaacgacgcgtccaattagtagatcacaagctggtgagtcttccgttccgccaagtggaattgcacgttctaatacgcattccattcgaatatttgcttcttttacacctggaacagagatgacttcactttcgattggtgttaattttgctagttcaatttcactttcatttggcgggaggttagctgctgtttcgttaattgctgctacatatgattcgtcagaaatatgtacgacaaattctcctttttcaattgcgtttcgggaagtgtcctttctttctccggcttttcgttgtacagatactgagataagtggtggattagcagcgacaatattgaaataactatatggtgctccgtttagtacgccttcttttgttacagaagtaacgaatgcgacaggacgagggatgatacttccagtaagtaatttgtaattatctttttcagtttgttcatttggattaatggataacatgcttgtaatcccctttctaaatatgaatacttattgtttgtttacaagataacgatgagaaaatcctgctggaaataatattttgtttcataaaaagaacttacttcaattgtaatgaagtaagttcttttttcaagaatctcaaatttgagataaaaattaaagtaaaacgtatgcgccaggtccgattaaagctacaccaacagcgacagcgattaacattaagttatattcatatccgttttgtgttacccagtaaccattttttccgtgaacagtgaagatagccattaacattgttccaacgataaataatgaaccaactacaatgaaaatacctgatgcaaataagaaaccacctagtaattcagttgcgccagccataaatgccataaatacaccaggacgtaaaccgattgactccatccagccacctgttccttttaaaccgtaaccgccgaaccaaccaaataatttttgagcgccatgacccatgaatgtaattcctataataagacgaataataagtagaccgaaatccatcatttttaaaaacctcctaaaagttattaacttaccttacgtaagtaataataaaatagttacttactttagtcaagtgaatttcgaaaaaagtttgaattaaattttacaaattaacaacaaaaaataaaatgtagtaaagacctctagacaagttgggcaaaaaaagagaaaatataaatagaagttaacttctaattgttattcagacaatcagaattgactggaattttgtgaagcgctacaataagagtctattagtaatgacgtaatttatttcgaaagcgtttttacagtataatattcgaagtatgaagtcttacatgtatcccgagctttactagggattgccctataaacttttaggtaaattataaggaggactatcctatgtttaaaaaattattcggtcttggttcaaaaacaaatgaagaaacaatcgtagctccattaactggagcagtgaaaaatattgaagaagtaccagatccagtatttgctggtcgtatgatgggtgacggtgttgcaatcgatcctactgaaggtgtagttgtatctccagttgatggtgaaatcgtacaattattccacacaaaacatgctatcggaattaaagcgaaaaacggtacagaaattttaatccacgttggattagaaactgtaaaaatggaaggcgaaggtttcgaagctcacgtttctgaaggccaagctgtaaaagctggagataaattaatctcattcgacttagaattaatccgtgaaaaagcgaaaagcacaattactccaattgttattacaaacacagatgcagctgagtctattaagacaactgtaggcgtagcagctacaaaaggttcaacagaagtaatgaaagttacaatgaaataattgcaatataagaggaatccgtttcgtatgaaatggattccttatttttgttgcatgttcagcatgtatgttaaaatactctaggcacttggaaatagggtttcacatatatgtggataaggctcatttttcttagaaaaaatataagagaaatgcgccttttgtatattcacatttcttttgttctattctaatgtaagttatgatgaatggtaagaaatcgaatataggggtgggtttgaatgaaacgagtgttatttgtttgtactggcaatacatgtcgtagtccaatggctgaggcgttgcttcgtcatcacggaggagataagtttgaagtgcaatctgctggtgttttcgcctatcctgggagcgatgcatcggtacatgcgaaggaagctttagctgaaaaaggaattttaattgatcatgcggcgcagcaagtaaatgaaactttgcttgattgggctgatattgttgtaacgatgacagaaaaccataaacaaattgtacttgggcattatccgagcgttgaaaagaaattaaatacgttatatggattaactgaaggtataggcaaggacatttcagatccatttggaggctcgctttctatttataaagaaacgttagatgagatggaaaaacttgtacaaactttactgaaaaaacattcagtaggttgatgtttcgtgtataatacgatattggagatcacttcttcctatatgaggtagcgagtgtgaaatgaagataattgattgaaactttggaggggtaaaaatgaaagtagtaatagcatctgatcacggcggtatgaatatccgcaaagaacttgtaagtttattagaagagttaaatattgaatatgttgatttaggttgtgaatgtgaagctggttctgttgattaccctgactttgcgtttccagcagctgaaatggtagcgaatggtgaagtagatcgtggtattttagtttgtgggacaggcattggtatgtcaatcgcagcaaacaaagtaaatggtatccgttgtgcgttagttcatgatactttcagcgcgaaagcaacgagagagcataatgacactaacatgctagcgatgggcgagcgtgtaattggtgctggtctagcgcgtgatatcgcgaaaatctggttaacaactgactatgaaggtggtcgtcacgaaaaccgcgtaggaaaaattaaaacatacgaaacaaagtaatagattctaactatcagtagtgtgaaatataatttggtgaaccaacctgtgaaaggaagaggcgtaatgacagaaatcgtaaaggtaagagaacagctacaaatgtcgctttctgatttccaagaacaagcttcattacaaagcggtcaaatttttgtagtgggttgtagcacgagcgaagtgctaggcgaaagaattggaacatcaggaacgatggaagtagcagaggcgattttctctgagttaaaacaatttcaagagcgaacaggtattgaattagcgtttcaatgttgtgagcatttaaaccgtgctttagtagttgagagagaagtagcgataaaatatcaatttgaaattgtaacagttacgcctgttagatcagcaggtggtgcattggggacatacgcgtatcacaatttgaaagatccggtagtagttgagtttattaaagctgatgcaggaatggatattggtgatacatttatcggtatgcatttaaagcatgtagctgttccggttcgtacaagtgtgaaggcaattggaagtgcgcatgtaacgatggccaaaacacgtggaaaactaattggtggagcgcgtgctgtctatgcggcagtggaagagactaccacttgccgttaaatatgagaaattaggaagtcatatagtaactgtttatcataagataaaaggtatgttgtctgactttataatagaagaaagaaaagaccgattttcggtcttttttttcttttatgatatagaaagtcatgttagaatgtagttgaaaacatgaaggttcgaaagaattacaacctgaattttcgttttttctgaataaataagaaaaaactgttgggaatcgatgtaattcgttcagaaaagggggattttggtggatcatttaaaacgtcaagatgaaaaggtatttgctgcaattgaggcagaactaggaagacagcgttcaaagattgagttaattgcttcggaaaacttcgtaagtgaagcagtaatggaggcacaaggttctgttttaacgaataagtatgctgaaggatatcctggaaaacgttactatggtggctgtgaacacgtagacgtagtagaagatatcgcacgtgatcgcgtgaaagaaattttcggcgcagagcacgtaaatgttcaaccacactctggtgcacaagcgaacatggcagtatactttacgattttagagcaaggcgatacagtacttggtatgaacttatctcatggtggtcacttaacacacggaagccctgttaacttcagtggagtacaatataatttcgtagaatatggcgtggatgctgactctcaccgtattaattacgatgatgtattagcaaaagcgaaagaacataaaccaaaattaatcgttgcaggtgcaagtgcataccctcgtgttatcgatttcaagcgattccgtgagattgcagatgaagtgggcgcttatttaatggttgatatggcacatatcgctggtttagtagctgctggtttacacccaaatccagtaccacatgcacatttcgttacaacgacaacacataaaacgttacgtggtccgcgtggtggtatgattttatgtgaagagcaatttgcaaaacaaattgataaatcaatcttccctggtattcaaggtggtccacttatgcacgtaatcgctgcaaaagctgttgcatttggtgaagcacttcaagatgatttcaaaacatatgcacaaaatatcattaacaatgcgaaccgcttagctgaaggtcttcaaaaagaaggacttacacttgtttctggcggaacagacaatcacttaatcttgattgatgttcgtaacttagaaatcacaggtaaagtagcagagcacgtattagatgaagttggtattacagtgaacaaaaatacaattccatttgaaacagcaagcccatttgtaacaagtggtgtacgtatcggtacagcagctgtaacatctcgtggtttcggtttagaagaaatggatgaaattgcgtcacttattgcttatacattaaaaaatcatgaaaatgaagctgcattagaagaagtacgtaagcgtgtagaagcgttaactagcaaattcacaatgtatccaaatctataatagattgaagaagactgccgagacttaattgttttggcggtcttttttgtggacatatattatttttaaagtatgtatacaaatgatgaataaattttggcgatataatgaaggatacagctcccataattggtaaagatactagatagattcatcgtaaaatcatgattttgccaaatttgcccttgaatattagtagcgttttctttacaatcgtaaatagtgtaaaaaagcgtgcaaacgcatgaatatcatctaaaggagagattcacatgggaaaactgtatgtatttgatcacccgttaattcaacataagattacatatattcgcgataagaatacaggtacgaaagattttcgtgaattagtggacgaagtagcaagtttaatggctttcgaaattactcgcgaccttccacttaaggacattgaaattgaaacacctgtaagcaaagcgacaacaaaagtgatcgctggtaaaaaacttggtttaattccgattttacgtgcaggtttaggaatggttgatggaattctgaaattaattccagcagcaaaagtaggacacgttggtttataccgtgaccctaaaacattgcaaccggtagaatactatgtgaaacttccaacggatgtagaagagcgtgactttatcgtactagatccgatgctagcaacaggtggttctgcggctgaagcaattaactctctgaaaaagcgcggtgcgaaacaaattaaattaatgtgtatcgttgcagctccagaaggggtaaaagtagtacaagaagaacatcctgatgttgatatttatgtagcagcattagatgagaaattaaatgaccacggatatgtagtaccaggtcttggtgatgctggtgaccgtttattcggaacgaagtaagacaactgacgagcaggggagatttcccagctcgtcttttttgttgtaagcaagtaggggagggggagaggataaatatacatcgtatatacaacataagttgcatacacctcacatataatatagaagtcttacgtctgaggaacactatattatggaagaaaagcgttatatctcgaaaatataatagtgacaaacttgtgaacatttccttctattataaagagaaaactgttagaaattgcatatatgtaaccagtatttagaaggggaacgttttcatttttgggaggaaatgcctaatactcaaatttttagattttttacgatttctcgttgacactgttaataccctattgtatgctaacaacggggatagatggtagggctttcagtgacaaaattacatctattccgtgacgaaaatgtaaactttttgttttgtataggatttatgcaaaaaaatgagttattattaacacatcgtgaatgagggttacatattggagggatgaatctttgcaaaaaaacgatcgcagccatataaaagcttatgctttaatgtcaggtattcttgctcaattagtcggttctattcttgttggaatctttggtgggcagtggattgataataaggttggaacgtttccgttgtttcttattatagggttattactcggactaggaacaggggtatacgcaatgattcgactcattcgacattactattcgggagagcaatgatgatagacgtacatggacttgtccaaagacaaaagaaatatatgtactacttgcttgcgcttctagtgctaggatggggatttacctcttacaaggatgtatttcttggactgattatcgggacgattttcagttttcttagtttgcgcatcattgcacgtagaacagacaagctgctagatcgcgtaacaaatggagaaaacgtgaagttcaaggcaacagcggtaagtacatattcaagattcgccacgattgggttattaattttatttgcagccaaatatcaagagttaatcgcgatgtggggcctaggtgtaggattgctgacaggataccttgtcatgatcatagattttctttatttagagtataagagcagggaagagaggtgaattactagtggaacacggtaaattagttgaatttctaggtttaacgttcgatttgtcatcagttatgatggttactgtagcagcagttattgttttcttaatcgctgttatcggaactcgcagcttagctcttcgcccaaccgggatgcaaaacttcatggaatgggtgtttgacttcgtgaaagggattatcaatagtacgatggactggaaaacaggtggacgtttcttaacgcttggcgttacgcttatcatgtttatcatcgtatcgaacttccttggtttaccattcatgtattcagcaactgaagctggcgaacatattgcatggtggagatcaccaacgtctgatccagcagttacattaacattagccgtgatggtagttaccctcacccattattatggaattaagatgaagggtacgaaagagtacgtaaaaggttatttccaacctatgaaattcttattcccattaaaggttattgaggagtttgctaacacattaacgttaggtcttcgtttatttggtaacatttatgcaggtgagatcttattaggattacttgctaagttgggcggagcatcagtccttggggcattaggtgcgcttgtaccaatgttagcatggatgggattcagtgtattcgttggttcaatccaggcatttattttcgttatgttaacgatggtttatatggctcataaagtaagccatgaccattaatataatttaagtaagaaaaaatttatttttttataatacaaaggaggacaaattaaatgagtttaggtgtaatcgcagctgcaattgcaattggtttatcagcattaggtgcaggtattggtaacggtcttatcgtatcacgtacaatcgaaggtgttgctcgtcaaccagaattaaaaggcgcacttcaaacaattatgttcatcggggttgctttagttgaggcacttccaatcatcggtgtagttattgcattcatcgtaatgaacaaataagggagactccccttacatagatggcgaagagtgtttttccgaactttcttcgccattgctttatgaatgaaacgtatgtctttttttttcatatgatcaatttagatattttgaagggagtgaatccttgtgccaactttattattaggtgctgccattccatttggaacgattgcttatacattgttcattttcttacttctattagtaatgctacgcaaatttgcgtggggtcctttaatgggaattatgaaagaacgtgaagagcatgttactaatgaaatcgacgctgcagaaagaagtaatgctgaggcgaagaagttagtagaagaacaacgtgaaatgttaaaacaatcacgtgttgaagcacaagagttaatcgaaagagcgaaaaagcaagctgtagatcaaaaagatgttattgttgctgctgcgaaagaagaagcagaatcaattaaagcatctgctgtacaagaaattcaacgcgaaaaagagcaagcaattgctgctttacaagaacaagttgcttctttatctgttcaaattgcttctaaagtaattgaaaaagaattaaaagaagaagatcaagtgaagttaattcgcgattatattaaagaagtaggagaagcgcgatgagcaatgggattgtagcaaaacgttatgctgtcgctctttttaaaattgctaaagaaaaacacgtattagaaatgtttgaagaggaattacgccttgtacaaaacgtttatgtaaagaacggagaactacatagctttttaacgcaaccgaacatttcaaaggaacaaaagaaaacgtttcttgcaaacgtattcggatctgtttctgaatctattttaaatacgttatatattttaattgataacaaacgcattgatatcttacctgaaattgcagatgaatatgttgttcttgctaatgaagaacgtaacgtagcggatgcaactgtatattctactcgtcttctatcagaagaagagaagcttaacattgctgaagcatttgcaaagagaacgggaaaagatgcaattcgcgtgaaaaatgttgtagatgaagatttactaggcggaattaaagtacgtattggaaatcgcatttatgacggaagtttacaaggaaaattagcacgtattcagcgtgaattaatgaagaatagataggggtgaagcacatgagcatcagagctgaagaaattagcgcactgataaagcaacaaatcgagaactatcagtctgaaatcgaagttagtgatgttggtacagttatccaagttggtgacggtatcgcgcgtgctcatggtcttgataacgtaatggctggtgaacttgtagagttctctaacggcgttatgggactagcacaaaacttagaggaaaacaacgtaggtattatcattttaggaccttacacagaaattcgtgaaggtgacgaagttcgtcgtactggtcgcatcatgcaagtaccggtaggaaaagaactaattggtcgtgttgtaaacccattaggtcaaccagttgatggtttaggcccaatcaatacaacaaacactcgtccaatcgaaagtccagcaccaggtgtaatggatcgtaaatctgttcatgagccacttcaaacaggtattaaagcgatcgatgctcttgtaccaattggccgtggtcaacgtgagttaatcatcggtgaccgtcaaactggtaaaacagcggttgcacttgatacaatcattaaccaaaaagatgaagatatgatttgtatctatgtagcaattggacaaaaagaatcaactgtacgtaacgtagtagaaacactacgtaagcacggtgcattagagtacacaatcgttgtaactgcatctgcttctcaaccagctccattattatacctagctccttacgctggtgtaacaatgggtgaagagttcatgtacaatggtaaacacgtattagtagtatatgatgacttatcaaaacaagcagcggcttaccgtgagctgtcattactattacgtcgtcctccaggtcgtgaagcttacccaggggatgtattctacttacattctcgcttattagagcgtgcagcaaaattaagtgatgcaaaaggcggcggttctttaactgcactacctttcatcgaaacacaagcaggggacgtatcagcatacatcccaacaaacgtaatttctattacggatggacaaatcttcttacaatctgacctattcttctctggcgtacgtccagcgatcgatgcgggtacttctgtatctcgtgtaggtggatctgctcagattaaagcaatgagtaaagtatcaggtacacttcgtcttgaccttgcatcttaccgtgagttagaagcgttcgctcagttcggttctgaccttgataaagcaactcaagcgaaattaaaccgtggtgctcgtactgttgaggtattaaaacaaggattacacaaaccattacgtgtagagaaacaagttatcattctttacgctttaacacgtggattcctagatgatatcccagtagtagatatcactcgttttgaagaagaattccatgcttggttagattctaatgcgactgacttattagaagaaatccgcacaactaagaaacttgcggatgacgacaaatttgcagcagcaatcaatggatttaaaaaagtatttgtagcttctgaataataaaagcggaagcggctcgttctgaatgtgagggggatggagcttctgacgaagaggcggtgtttgcctcgtaggaagaagtgaagccaccgagcattcaagccgctggagctagatagtatatataaaaggcatctcgggctctgagattgctaaaggtcatgtaaaggaaaagagtaggtgcacctattcttttccttcaatcatgagcaagaatatcttgcaacgtagattaggaagaggattcttactaatcgtgccaacttccggaaaaaaggtggtgaaaacctgtggcatctttacgcgatataaaagcgaagattaactcgacaaagaaaacgagtcaaattacgaaagcgatggagatggtatctgcatctaagttaaaccgtgcagagcaaaatgctaaatctttcgttccgtatatggaaaagattcaagaagtagtagcgagcattgcgcaaggaagcaaagggattaatcatccaatgctaaatgcgcgtcctgtaaagcgtacaggatacatcgttattacgtctgatcgcggactagcaggtggttataacagtaacgtattacgtacagtaagtaacgtaattcgtgaacgtcataatatggattcaaaccaatattctattattgtgcttggacgactaggacgtgattatttaaaacgtcgcggctttaacattattgatgaagtagttggattatctgaccacccatcatttactgatattaaagaccttgcttctcgagcaattgcgatgttcgcagatggtgcttatgatgagctgtacatctactacaaccattacgtaagtaaaatttcacaagaggtaacggaaaataaaattttaccgcttactgatgtggcgtctgacaaaccgacgacagcttatgaattcgaaccttctgaagaagaaattttaaaagtactattgccacaatacgcagaaagcttagtgtacggtgcattactagacggtaaagcaagtgaacacgcagcgcgtatgacagcaatgaagagtgctacagacaacgcaatggaagttatcgattcacttacactttcattcaaccgtgcgcgtcaggcagcgattacgcaagaaattacggaaatcgttggtggagcagcagcgttagaatagtattaaaaggcggaagcggttcgttcagaatgagagggggatggagcttttgacgtagaggcgatttgtgcctcgtaggaaaaagcgaagccaccgaacattctaaccgctggagctagattcaataaaaagcggaagcggctctgtcaaaagagtcgcgtaagctataaaccaataaaaaattaaaagctagctgctcgtagaaagttggctaattaaaagaaagctaggagggaacccgatgaataaagggcgcgttacgcaaatcatgggtccggttgtagacgttaagtttgatggcggaaagctaccagaaatctacaacgcccttacggtaaaacaaagcaacgaaaacggaagtattaacttaacatttgaagttgcacttcatttaggtgatgatacagttcgtacagttgcgatgtcttccacagatggacttgttcgtggcacagaagtagaagatactggtaaaccaatctctgtaccagttggtgatgtaacacttggtcgcgtatttaacgtattaggtgatgcaattgacttagatggtgaggttcctgcagatgtacatcgtgatccaattcaccgtcaagcacctgcattcgaagaattatctactaaagtagaaattcttgaaactggtattaaagtagtagacttacttgctccttacattaagggtggtaagatcggcctattcggtggtgccggcgtaggtaaaacagtattaattcaggaattaattaacaacatcgcacaagagcacggtggtatctctgtattcgctggtgtaggtgagcgtactcgtgagggtaatgacttataccacgaaatgagcgattctggcgtaatcaagaaaactgcgatggtattcggacaaatgaacgagccacctggagcacgtcaacgtgttgcattaacaggtttaacaatggctgagcatttccgtgatgagcaaggacaagacgtacttctgttcatcgataacatcttccgtttcacgcaagcgggttctgaagtatctgcccttcttggtcgtatgccatctgcggtaggttaccaaccaacacttgcaacagaaatgggtcaattacaagagcgtattacatctacaaataaagggtctatcacgtctatccaagcggtatatgtaccagccgatgactatactgacccagcaccagctacaacgttcgctcacttagatgcaacaacaaacttagagcgtcgtttaacgcaaatgggtatttacccagccgtagatccattagcatctacatctcgtgcactttctccagaaatcgtaggagaagaacattatgaagtagctcgtcaagtacagcaaactttacaacgttataaagagcttcaagatatcatcgctatcttaggtatggatgagttatctgaagaagataagttagttgtacatcgtgctcgtcgtattcaattcttcttatctcaaaacttccacgtagctgagcagtttacaggtcaaaaaggttcttacgtacctgtaaagaatacagttagtggtttcaaagaaattctagaaggaaaatatgatgaccttccagaagatgcattccgcttagtaggtggcattgaagaagttattgaaaacgcgaagaaaatgatggcgtaaggccttaggagggacgaagtatgaagacatttccagtcagtattgtaactcctgatggaccggtttacgaaaaagaagtagaaatggtaagtgtaaaagcagagagtggggaaatggggatcttaccaggtcacattccaactgttgcaccattaaaaattagtgcagttcgtctgaaaaatggtggacacactgattatgtagcagtaagcggtggctttatcgaagttcgtccagataaagtgactgtattatcatcatctgctgaagaagcaaaccatatcgatatccatcgcgcaaatgaagcgaagcgtcgcgctgagcaacgtctgcaagataaacaagcacatgttgactttaaacgtgcagaaatggcattacaacgtgccgtgaaccgtttaaacgtttccgatatgaagtgaaaaaatccgtaagggctttgcctttacggattttttttttgtgtattttatggataattttacaaaactggtataattatattgatgcttgtataagtagaagtgtacaacaatttatatttcataaaggggatgaatcaatgattggtgaaatgaagcgagaagcattgtactctttaaagggaaaatggggactaggtgttggatcaacaattttatattttattttaagttatgtcgtttcgatggctgcaatgcttatactattaattccaggaattattatatttctcttatttgctggtctagcaggttcacttgaagggcaaacaatatcaaatggagcaagtgttacattcgggattttttattgcattatgataattttgagtagcgcatcgtatgggattacatcatacggttatacaaatgtatttttacagatcagtatacgagaagatgctaaagtagattacttatttgaaggatttcgtggctttaaaagaatgatgaaaacaatgtgggcaatgcttgcaattttattatatacaggtacatggattccgatattgttagtagccttatttgcattttttggtgaagaaggaaatgcgtcgtttgctattgctatctgtgtactactagaaatttcaattgttggtatgattgtgatgtatttttcttatgcactgacgtactatgtgatgattgaaaatccagaatatagtgtttcgcaggcgatgaaggaaagtaagaatcttatgaagggtcataagttagatttgtttcttttatggctgagcttcataggatgggctattttagcgcttcttacttttggaataggatttctttggcttagtccgtatatgagtacgacgacagcacacttttatcgctatatttcaaaaggtgaatttcaatagtaacatgctatactaatagaattattgtgtataggaggcgaggctacgcatgattagtgatttaaaaggagaagcactagattcattagaagggaaatggggattagctgttggagctacactactcatttcaattcttatcacggcttttagttttagtgttgattggggattttctttaattttcggttggcaaaaaacaaatggttcactttcaacgaatattcttacattttttgttactggaccgttaactttaggtggatattaccttggtttaaatatccttcgtgaaaagcaagctagtattggtaatatattcatttggttttcagagggaaagagatttctaaaatcatttttattatatttattagtaaatctttatcttttcttatggacgttattgttcattattccaggtattattaaatctttttcttatgcgatgacatactttattataaacgatcatcctgagtattcactgaaccaagctattacagaaagtcgtcgtatgatggatggacataagatggagtatttcattttatgtttaagttttattggctggtttatattaagttgtattacattaggaattggattcctgtggttaattccatatttctatacgacatctgcagctttttacgaagagatcgcagaagaatattatgagaaaaatatttagcattataaaatccccagtatgaattatttgttcatactgggggttttttgtagaaattttataaactgattactagtaagtggtttactgaaatagtaaccttgcatatatttacagttatgtttttgcagaaacttaagctgtttttcggtttcaattccttcggcaacgactgaaagatttaaagtatttgcgagggaaagtattgtagaaacgatggctcgttcttcaggacgatgatcagctaattgtgtaaattctctcggtacttttaatgtgtcgattggaaaaattgataaataagcaagagaagaatacccagtaccgaagtcatcaatggaagtttggataccgtattcttttaattgcttcagtcttaataacgtttctttctcgtcaatcattgcaatcctttctgttaactcaagggttacatattttggatcgacttgcacgtcgtttaatatttgtgaaatgctttcaattaattgatcttgccggaactcttttgcggatagattaacacttatttttaaattttggtagccaaaggtatgccatatttttaattggagacaagcttcttgtaatacccaatgtccaagtgggactacttgtggcgtctcttctacaattggaataaactcacatggtgaaatgtcacctaatagtgggtgtttccaacgtattaaagcttcagcaccgataattttatttgttgtcgtatcaatttgtggttggtaaacgagataaaattctttgtttactaaagcgatgggcaaatctttttcaattcgagcttttcgttccatttttttatatagttctttcgtgtaaagagagctaccgttttttcctttattctttgcttcgtacatggccatatcagcatgctgcaaaatggatagcgcatcttcacctgcttcaggatatattgcaattccgatgctcggtgagatttgtaaatgttgattttcgatttcaaatggctcattcatggccgctacaatcctatcagctattttttggacatctggcttttttttgtaattctcgataaggattgtgaactcatccccagctagccgcgcgagtttcatatttgatgttgctattctttcgagcctttttgctactgcgatgagcaacaggtctcctactcgatgaccgagggtatcattaataactttaaaacggtctaggtcgagaaacataacagcaaaaggctttttcgatatttttgctcgcgcaattgcctgttctaaatgttgatgaaatgcacgtcgatttgcaagctctgttaaagtgtcatggtatgctaggaaattaatttgttcttgttgttgcttgctttctgtaatatctttaatcattaaataaaccccagaaattttctcctttaaaaagatcggtacggcggtaacgtgcaagtagtaaatatctctgtttttatggtacgcccgtatttctaaagagatagaatacccctttttcacgcgatgaaaggcgttaatcatttcttctaaatcttcttcgtatatgagtgaatagtaaggctggtttaataattcattcgtttgataaccgagtaaagtagtaccagcgttatttactttgagaaaattaccgtacaaatctaatgtgaagattggatctggatgatgctcgtataaagatttaaacatttgttgattatgatagaatgatagagttcatttttctgttctactaaatcttctgtacgtagtttaatttgtttctcgagttctgagttgaattgcatttgagctagcaataagattttattttgttttcgaactaaactatgacgtatgagaacgaaagagaaagttattataagtccgattactataataggcgcaaaaacgtattcaactaatatgaaaacaataagcattactaccgaaatatacggtaatgataatcggattgattcaccaattttaggtgttagtagtacttgttcttgtttttcaggcttttttgtatggagaatacaggcgattgctactagtactaaggttacttgatagaaaggagtaactgtaaacatagaatactctggtatgaagtattttatatacgcataaatcgcatctgtagtagcatataaaattaaagcactgccaagaagtgcaccgacctttttaggtaataaggatagtggtttgaataaaaggttgattcctattaagagaaagagtaaatcagccattggataggtaagttgaacaaatatgtcgatataggatgttgtaaagatatgaatagttcgttcaataagtaagtagtaacttaaagtaaattgggctgtaacgataatacaaatatcacatagcataaaaagtttttctaataaatctcggttataaatgatttcgtatagaaaggcaaacgtaaagctaactaaaaaaagtaagtaaaaaaagtcagatggatcaacgaacgtatagaagtcctttacaattaaacgctgataggcaacgactatatcaccgataaaataagagagagctccaacagataatatgatccaaaataaacgagatagcccttctttcatgtttgaaaaataaagtaaataactacaagcgataatatcaattaatagggtactcattccgattaatagctgaaaagaaaatgagtattcatatagaaaaggcatcgctacatagtgaagcgttatagacagcaatacaatgcttataagaatacttacatgtgtttgttttttcatttatatcacctacggtttcttgaaaagcatatataagttttatatttattttgcacaattatagcaagttgtaaagatagattttaataattcttgtttctgcctcccaacatatcgacataggaatttgaattttgctataatgattagaatagttgcattatttagaaaaatttaaaaataataattactgcaactaggacatattgtttactatgtgaacttgttcttaatttaggggggagggtttcacaatggcaagtgtatatgaaaatagttatatgatcgttttgattttcttgctattaggtatattgctgccggtagtggctcttacattaggaaggatgctgcgcccaaataaaccaagtgcagcaaaggcgacgacgtatgagagtggaattgagccttttcatgatgcaaatattcggtttcatgctcgttattatattttcgctttattgtttgtgatctttgatgtagaaactttatttttatatccttgggctgttgcgtatgacaagctaggtttatttgcattaattgaaatgctcatctttgttgtaatgttgctagttggattagcgtatgcttggaaaaagaaggtgttacaatggttataaattttgaggaattacatccaaatgagcgagcagaattagaacgaaatatctttttttctacattggaacagttgaaaggatgggcgaggagcaattctttatggccgatgacattcggactggcgtgctgtgcaattgaaatgatgggagtaggttcatcacattatgatttagatcgatttgggtcattttttcggacttcaccaaggcaatcggacgtcatgattgtatcgggaacggtaacgaagaagatggctcctattgttcggcgcttatatgatcaaatgcccgaaccgaaatgggttattgcgatgggatcttgtgcgacagcaggtggtccgtatgtaaattcatatgctgttgtgaaaggtgtagaccaaattgtaccagttgatgtgtatattcctggttgtcccccaaatccagctgctttaatttatggaatcaataaattaaaagaaaaaattcgttacgaagcaaagaccgggaagcaggtgacgaataaatgagcaatccaaataaagatttagaggagctgaaaaaagaagcagctaggcgtgcaaaagaagaagcgagaaaacgccttgtagcgaaacacgaggcggaaataagtgagcttgaggaagaagatcaagaaaaagagaaagcgctaccaaaaaacgatgatattactatagaagaagcaaaacgacgtgcagcagcggctgcaaaagcaaaagtgacggcgttagcgaagcagaaaagagaaggaaccgaagaagtaacggaagaagaaaaagcaaaagccaaggcgaaggcagcagcggctgcaaaagcaaaagcggcagcgttagcgaagcagaaaagagaaggaaccgaagaagtgacggaagaagaaaaagcgaaagccaaggcgaaggcagcagcagctgcaaaagcaaaagcggcgacgttagcgaagcagaaaagagaaggaatagaagaagtaacggaagaagaaaaagcgaaagccaaggcgaaggcagcagcggctgcaaaagcaaaagtggcggcgttagcgaagcagaaaagagaaggaatagaagaagtaacggaagaagaaaaagcgaaagccaaggcaaaagcggcggcgttagcgaagcagaaaagagaagggacagaagaagtaacggaagaagaaaaagcgaaagccaaggcaaaagcggcagcattggcgaagcagaaagcctcgcaaggtgatggggattcgggagatgaaaaggcaaaggcaattgcagcggcaaaagcgaaagcagcagcggctgcaagagcgaagacaaagggggctgaaggtaagaaagaggatgagccgaagcaggaagaactgtccgtaaatcagccgtatttaaatcagtatgttgaggctattagggagaagttaggagagggtgcattagtagattcctacattaataaactgtcaaaggatgtgccaactcttgtggtggatcccgaaaaatattatgaagtgatggagtcactgcgattccatgagggacttgcttttgattatatgtcagagctacatgcgacggattttgtgacacatatggaagtgtatgttcatttgttttcatatagtaagaaacaatcggtagcggtgaaggtaaagctagaccgagaaacgccgcaagtcgaatctgtgacagcgctttggaaaggggctgactggccggagcgagaagcatacgatttgctcggcattatatttaaagggcatccgaatttaacacgtattttaatgccagaggattgggtaggatatccgcttagaaaagactatgaaccgtatgatgtggaggtgtagctatgatccgcacggaagagatgcttttgaatgtaggacctcagcatccgagtacacatggtgtgttcaggctcgtaattaagattgacggggaaattattaaagaagctacacctgttattgggtatttacatcgcgggacggaaaagatcgctgagagcttacagtatacgcaaattatcccttatacagatcgaatggactatttatcagctatgacgaataattacgtcatttgccatgctgtagagacgatgatggggcttgaaattccagagcgtgccgaatacttgcgagtacttgcgatggagctaggaagaattgcgagccatctcgtttggtgggggacaaatcttcttgatataggagcggttagcccgtttttgtacgcttttcgtgaacgagagatgattataaatttattaaatgaattatgcggggcacggcttacttttaactatatgagagttggtggtgtgaagtgggatgcgccagatggttggattgaaaaggtggaagagtttgttccgtatatgagagagcaactggcaggttatcatgatcttgttagcggtaatgagattttcttaaatcgtgtgaaaggcgttggtatatatagcgcggaagaagcgatttcgtattctttaagcggagcaaatttgcggtgcactggagtaaactgggatcttcgcaaagatgagccgtattcgatttatgatcgttttgattttgatattcctgttggaagcgtgggagatgcttgggatcgctacgtttgccgaatgcaagaaatcgaggagtctttaaagattgttgagcaagcggttcagcagttcccgaaagatggagctgtgctggcaaaagtaccgaaaattattaaggcacctaagggagaagcatttgtacgtatcgaatcgccgcgcggagagattgggtgttatatcgctagtgacggaaagaaagagccgtaccgtttgaagtttcgtaggccatctttttataacttgcaaattttaccgaagttattgaaaggtgaaaacatcgctaatttaattacgattttaggtggagttgatattgtacttggggaggttgatggctaatgattgagacgctcttacaatcaccttcaagctggacgaatttcttcatttttttcggattagcggtacttctactatttgcagtccttggcttcgttacatatggaattttggcagaacggaaagtgatggggtttatgcaagggcggattggcccaaaccaggttggaggccgatttggtttactgcaaacggtagctgatgttttaaaactattattgaaagaagatagtattccgaaagcagcagataaaccgctgtttatattagcacctgtcattgcatttgcaccagcatttatggtgcttgcagttatcccgttcactgataaatttcaatttgcagatattggagtcgggttactttattatatcgctgtttccggtattacgacgataggtgttgtaactgggggatgggcatcgaataataaatattcccttttaggagggatgcgtgcggcggcgcaaatgatttcttatgagattccgctcgtaatgagtgtaattggtatcgttttgctagctggtagcctgaatttaaatgagattgtagcggcgcaggagaaggtttggtacattttcgtacagccaattggcttcgtcgttttcttaatcgcagcagttgcagagttaaatagaacgccattcgatttgccagaagcggagtcagaacttgtttctggatatcatacggaatactcagggtttcgctgggcgtttttcatgctttcagagtacgtatatttcttcgggatggcatcgttaattacagtgctctttttaggcggatggaatccagtcatgtttcttggatttatcccaggtgccgtatggtttgctttgaaatttagcagtgtagtctttctattaatttggttccgcgttacgttcccgcgtataagaggtgaccagttaatggagtttggttggaaagtattattgccgattgcacttgcaaatattttcttaacggcattgattaaggagttattcttctaatctatgaggggggtgccagtaagagatgaaaggactatttaaaggattaaaatatacattaagtaatttgagcaagaagaaggtaacgtatgattatccaaatcaaccgttgccgttgccagaccgttttcgaggaattcaaaaattttatccggaaaaatgtattgtttgtaatcagtgctctaacatttgtccgacagactgtattcagttaacaggaaagaaacatccggatcctacgaaaaaaggaaaaattatcgacacgtatgatattaattttgaaatttgtattctttgtgatttatgtacagaagtttgtccgacagaggcaattgtcatgacaaataactttgaactcgcggaatattcacgtgatgacttatttaaaaatttgcagtggcttgacgaaaacgacgaaaacgtcaggaaggagaataaggcatgaatggcgagtttgtagcattctttatactatccttgtctgcaattatcggcggtgttcttatgttgaacttaacgaaagttatgcacatgatgctagctctcgttctgacatttctcagcattgcaggtttgtattttcttttatcagccgaatttataggcgttgcacaaattttactttattctggtgcaatcacaattattatgattttcggcattatgttaacgaaacataacgcggaaaatgaatcgcgtcttactcttcgaaaatggattatcttctttgcagttgtagcatttggagcggttatgtatttcgctgttaataatgttgattttgcaaatgaaagcacacaaggaagtttacctctccatgaaaacaacacacttcaaatcggtacgcttctctattcaaaatatattattccatttgaactaacttcagttattttacttgtagcactcgttggcgcaattatacttgcgaaaaaggacgagaaagaggaggattccaatgagtagcgttccagcttctgcatatttaacacttgcgattattttgttttgcatcggtctatttggagctttaacaaagcggaatacagtaatcgtattagtttgtatcgaattaatgctgaatgctgccaatttaaacttagtggcgtttagtaaattaggcttatttccgaatttaacaggtcaaattttctcactgtttacgatggctgtagcggcagcggaagcggcggtaggactcgctattttaattgctttatatcgcaatcgtacgacagttcaggtggatgaaatggatacgcttaaaggatagcattgtgaccgaaaaagggggaaggaaacaatgatcgattatgcatggctcataccgcttttcccactcgtttcgtttttgttacttattatattcgggaagaaaattagagaaggaagcagcgtacttagtatttttttcgtctttctctcctttatacttgcggtacttgtgttaatagaaaggttttcagaagcaagcgtgaagcataagtgggtgtggcttagagctggagatgtggatatatcattcggctttgaagtgactgcattaggagctttaatgttatttatcgtgacgcttgtgagtctacttgtacatgtgtattcgaaaggttatatgaaaggtgatgaacgattaccaaccttttacgcatatttaggactctttacatttgcgatgttagggcttgttatatcaacgaatttattacagctttatatattttgggaattagttggccttggttcatttttacttatcggtttttatttctttaaagaagaagcgaaggctgctgcaaaaaaggcttttattatgacccgtattggggatgttggtttatttatcgggatgattttaattttttggtacgcaggtagttttgaatatgacgcaatatttagggcgatttatacaggggatctacctccttacatgattacaataacagcgatattaatttttatcggggcgatgggaaaatcaggtcagttcccgcttcatacgtggttgccagatgcaatggaagggccaacgcccgtttcggcacttattcacgcggcgacgatggtcgcagctggcgtatatttagtagcgacgatgtttcctctattttcagcaagtacagtggcgatgcagacagtggcaatcgttggagctttcactgcaatctttgcggcctctatcggtcttgtgcaaacagatataaagagggtgcttgcttattctacagttagccagctcgggtatatgatgctcgcgttaggttctgccggttatgtagctggtatattccatttaacgacacacgctttttttaaagcactattatttttggcggcaggaagtgtaattcatgctgtgcatacgcaaaacattaataaaatgggcggtttacagaagaagatgaaagtaactggtacgctatttttaataggtacccttgccattagcggtgttccgctgctttccggttttttcagcaaagatgaaattttagcggcgacgtggatgaatggcaattacgttttatttactttagcggtaattgcggcgtttttaacagcattttatatgttccgcctatactttcttgtctttactggagaaacgaagacgaaggaagaagtgcatgaatcgcctcgcgttatgacgtatccaatgattgttctcggcgttcttgcggtagtggcaggatatataaatacaccatggtttgggacatttctcggagattggttgacgaaagatgtagggtttaaggttgaagaagcgcatggaccagtttggattatgattgttgcgacactcgtttcatttgcgggaatcgctcttgcatatttcatatatggcaagaaatcaatttctagagattgggctgggggtacggaaacatctctttataatcttttgaaagaaaaatattatgtggatgaactatacaacatgacggtgatccctattacgaaaggaatcgctcatgtgcttcgcttatttgaagtgtatgtagtcgaaggaattgcagttttaattggaagtgtagttaaaggcacaagtaatcttggatcgaaacttcaaaacgggaatgtacaagtgtacggtactgtaacggcggtttcgctcgctgtactcgtcattattttgctctatacgggaggggatttacgatgaatgatttgttgttaacgttcttcattttttccccgcttttaggaattttattgcttgtattaacaccgaaaaaggaattgcgtacagtgcgggcgcttggcttatttgggacggcacttccatttggaattgctatcgtcctcgcttgtacatatgcttctggaaagaatttgtcactatttgatgagaaggtgaaatggattaagttcggcgattttacagcggtggataaaaggtggttttctatttattacgagcttggtattgatggtttgtcgcttgtcatgatggtactgacggctcttctagcaacgcttgcagcaattgcagccttttctattaaaagaaatttaaaagcattttatatgctgttactcatgctagaaataggaatgctcggcgtctttgctgctcaaaacttaatgttgttttttatcttctttgaaattacgttgccaccaatgttcttattaattggaaagtggggaaaattgtcgagtgaaaaggctgcgtatagttatttaatatataacggtattggctcagctattttgctcattgttttctcaattttgtttgcgaaaacaggtacaacaaatattgtggagctgaaagagatattaagaagcataaacgcagagggagcactcgtcatcccaagtagtttgcagcttagtgtatttattgccataatgattgcttttgcaattaaactacctgtttttccgttgcaccgctggatggtcaatgtacacatagaagcgcatccagctgtagttatgcttcatgcgggtgttttgctgaagattggagcgtacggtattattcgcttcgggaaagggctattcccggaatattttcacgatgttgcaacactaattgcgatattaggcgtaattaatttattatacggtgcctttttagcgctcatccaaacggactttaggaaagtactggcttactctagtatttcgcatatgggaattgtgttaatgggacttgcgtcacttaatgcacctggtacacaaggagcgttattccaagttgtatcacatggtttaattgcagccttgctcttcttcctactgggtgttatagaacaacgatttggaacttcggatattacggtgctaggcggacttgcgaaaagtgtaccgatacttagcggattctttttagcaggaggaatggcatcgcttggattaccagggatgtctgggtttgttagtgaatttcttgcctttctcggtttatttcaaggagagcccgtcattgctgcagtcggtgtgattggcatcattttaaccgctgtatacgtattaagggcgacacttcaagtgacatttggaaagaaagagtgggaagcaaaatctgatatacacggatgggagtatgtccctgttttactacttatcttttgtattattgcaattggagttatgccagagttactaggggatccgcttcaaaatacattgaaaacattgggggtgaagtaggatggatatgaatacgttacttagcttatcgtggcatctaatggtgccagaatttattattctcggcgccgccatccttctttccatatgtgatttgttttttaagctgaatcatagatatgtagctcttggtgcgattgctgctatcgtattagcaatcgtgtcattaattacgctatatagcgaactagctggagatattttaaacggatcgtttgtgttagatggattttcaaaagggtttaaaacattgctattaggtgcctcagctcttattttatgcaccgcaatgagcgatgataagaagaatccaattgaagataagggtgaatattattacttatttttaatggcacttcttggtgcgatgttcatggcttctagtgttgatttcattacccttttcgttggtttggagttactttcactttcttcttatattttagtaggaatacgaaaaaagagccgtgcatcaaatgaagcggcaatgaaatacgtcattagcggaggaattggaacggcgattacgctcttcggaatgagttatttatacggtattacaggttcaactaacattgtagatatgcaaaaggtactcactggggaactcgctagtggtattcagttattgttagctctcgcatttcttttattgctagtcggtctctcatttaaaattgccacagtgccgtttcatatgtgggcacctgatgtgtatgaaggagcagctacaccagttactgcttttcttggaacgatttctaaaattgctggtttcctactcattattcgtttgttccttatggtttttgcaagtgtattaatacaaggagatatgcaatctttatatgggcatatgagtatatatattgcggtgctagcaagtattacgatgattgttgggaatgtagtcgcgttaaaacaatacaatataaagcgtttatttgcttattcgggcattgctcatgcagggtatttactcgttccacttgtcgcattatcaccatttacgatggatagcatgtggttttatatgctggcatacatgcttatgaatataggtgcatttgctatcatccacggcttaatcttacaaaatgatgaggaaaatataacgattttcacaggtttatataaaaggtcgccatttgcagcgattatgatgacaatttttattttatcgttggctgggataccaggaacggctggcttcatcggaaagattaatatctttttaggcgcgcttcatgtagatccagcacattacgtactagcttcgattatgatgggtacgacagttgtttcattcgtatattatttccgtattttacaacaaatgtttttccgcacaggagagacagaagagaggatacggttaccgttaaatataaaggttgttatgagtctttgtgcaatttcgattgtaatactagggattatgccgatgattgggtacaatttcttttatgaatattttccattaatgaaagatttcttcttcttagggaacgtggtacaatagtgaaaataaaaggtgtggagtcagtactctgcgctttttattttgtgttaacttgtaatgtagatatacgtttttggaaagaaaatcacgatgtaaaatgtaagatgtctatgtgcatttgaaaaagtgtagctcctacttattatggtatcgtttttatattctttcataagtagtagctgagtaaaaaggggtcgattttttggcacaacttttagggcaacaagcactgattgccattgtttcgcatttattgtttattaccattacgtggtgggccttacaaggcattcacattgagcgtttaatgaagtccggaaaagtgctgcagacgcgagtattactcatcttaattacaattgcaattgggacatctgtaagtaactttttccttgattatttaggctattcgaagagtttaacgtatttagtaaagtaagtgtatagaacctcaaatctccgttaacaatggggataggaggggatgaaattgaagcttaaagccattcttattgttgcacttagtgttgttttatttttggttggatatagagagatgaaaccgataagcgatgaacagaaaatggagagcatgatcaaggctttagagaaaaatgatgctaaagtagaaaaatggtcatggttagcgagagaaacaaaaacaatttctaacatacatacgtttcaaaagttgttaaacgatgtgaaggaaaaggcaaatattcaaaagtgggaagtagagcaatctccagatggatataaagctacatcctataaaaagctttcttcttatgaagaacgagtagtagtaacttggagtaaagaaaatactaaagaaaacactttcattatctttgaagtaagtggggcgaaatgggacccgaagtatgttcaaaacatgaataaaatttttagtgaaaaacctataatttacacttgtgttcaaggtgtactgaatgataagattgaaggtgttttgcaaaataaaaccaatcaggttttgaaagatctttcagcaagagcgatcgaacaagtagaagaaagagcatttgtgtcagtctccgcatacaataaaaagtgggatgacgctctttcaacaaatagagagaaaataaatgtgcaaatagcaatacgttctacagacaacaaagatacaattgtggttggcacaccgatcataacttctgagtattgagtgaatagatactgaaaaaaggacacggaggggaataatttggaaaagatcatcgtccgtggcggaaagcggttaaacggcacagtgcgtgttgagggcgcaaaaaatgctgtattacctataatcgctgcagccctattagcgagtgatggaaagaatgtactatctgaagtaccagttttgtctgatgtatacacaattaatgaggtattacgtcatttaaatgctgaagtcgtatttgaaaataatcaagtaacaatcgattcttctaaagaactaaacattgaagcaccatttgaatatgtacgtaaaatgcgtgcatctgttcaagtaatgggaccattattagcacgtaacggtcgtgctcgtattgcacttcctggtggatgtgcaattggttcacgtccaattgatcaacatttaaaaggcttcgaagcaatgggagcgaaagtacaggttggtaacggttttgttgaggcatatgttgagggagaactaaaaggagctaaaatctacttagacttcccaagcgtaggcgcgacagaaaacattatgtctgcagctacattagcaaaagggacaacaattcttgaaaacgcagcgaaagaaccagaaatcgttgacttagctaacttcttaaatgcgatgggagcgaaagtacgcggagctggaactggaacgattcgtatcgaaggcgttgataaattatatggtgcaaaccattctattattcctgaccgtattgaagcgggaacattcatggttgcagcagcaattactggtggagacatcttaattgaaaatgctgtacctgaacatttacgctcaattacagcaaaaatggaagaaatgggtgttaaaattattgaggaaaacgaaggtgtacgtgttatcggcccagataagttaaaagcggttgacattaaaactatgcctcacccaggtttcccaacagacatgcaatcacaaatgatggcattattactacaagctgatggaacaagcatgattacagaaacggtattcgaaaaccgctttatgcacgttgaagaattccgtcgtatgaatgctgatattaaaattgaaggtcgttctgttattatgaacggtccaaacagcttacaaggtgctgaagtagcagcaactgacttacgtgctgcagctgcattaatcttagctggtttagtatcagaaggttatactcgtgtaactgagttaaaacatcttgaccgtggctatgtaaacttccataagaaattagctgcattaggtgcaactattgaacgtgtaaacgaaaaagtagaagaagtgaaagaacaagaagtttctgatcttcacgcttaattgaaatagtctctatgtcttttgacataggggctatttttttgggttattactgttatagtcaataaattctatacttatgcacgtaccagtaaaaatatttagaaaatttctgttttatactcttccccttaagtatgttctaaaagaaagagttgttccataagaatgaatggagtaaagcttttatattgggggaaaataggatgaaattttcaaagccactttttattacagtagcgctcttaatagcgctcgttatcattgtacctgcagcccttgttattccatttgcgaaagcaaaagtaggggaagaaacggcctctaaaactcctccagcgatagaaagcataccagctccaggaaaagtagatacagctgttcaagttgctgtatatcgcgaaaaacagaagaaggtagaaacattaccagtggaggagtatgtgacaggtgtagtagcttctgagatgaatgccagttttgaaatagaggcactaaaggcgcaggcattagcagcgagaacatttgtagtacaacgtatgttaagcggaggaaagaaaaataatgcggacgtgacagatacggtgaaagatcaagtgtacaaaagcaaagatgaattgaagaagcaatggggcaataactacgaaaataatttgaagaaaatcgaagaagccgtttcgaaaacagcaggacaagttttaacgtatgatggaaaaccaatttcagcatccttcttttcaacgagtaatggccgaacagaaaatgcagctgactattggggaaatgattatccgtacttgaaaagtgtagatagtccgtgggatcaagcctctccaaagtttacgagtgagcaaacatttacagtagctgattttcaaaaacgtctcggtgtgaaagtgttagcagacgggaaggttggaaatattaaagaccttacggaaggaaagcgcgtaaaggatgtagcttttcaaggaaaaacattaacaggaaaagaagttcgtgaaaagttagatttacgttcttctgattttacgtggaaacaacaaggagataaaatcatcgttacgacgaaaggcttcggtcacggcgttggtatgagtcaatacggggcgaacggcatggcagcggaaggaaagaaatatacagatatcgtcgctcattactataaaggcgttgaaataaagacgatgaatgattatgaaggaaaattgatggtgaagaaataggtgtcagaactctggcgtctattttttttatgtaaaatagaataattttccattaattgtttgatataataggataaaaagacatttgggggagacgaaatggcgctactggagttgaaacagttagggaaggcgaaccagttaccggaaattgagctaaaggttgaaaaaggacaatgtattgttttgcaatgcaataatcatacagctaaagtgttacaccgcattattattggtcaagaagaagcttcaactggcaacgtactgtttgaaggggaagcaattggaaagaaaaattattcccgcataggcttttgttttttgaaggatgaagcatatgatcgtttgaaggtgaaggaatactttaagtttttaatagggctttatgaatcaaagataagtataaaagaagttgtgcagtctgttggtctcctagataagctaaacgttaaaatagaaaaactatcattttcagagaagcgtcgtcttcatattggacgaatgatgattcataatccggatttaatcattttggaagaaccggagcaaaatgtagatatagagagtacggttattattcgaaaagcaattatgaaaatgaaagaacaaggaaaggcaatttttattacgtcatcttttctatcggatgccctttcgttaacagaggatgtatacatattaaacaacgatggtgtgaaaaaagtagaaattgaacaagaggaagcagaagaagtcgatgaagagaaggtcgttcaaataattccgcaaatgaagttagaaagaatacctgcgaaagtgaacgataaaatcattttacttgatccgatggaaatccatttcattgaaacacaaaacggagtaacacatattcacgttcgtgaaggagatttcgtatgtgcattaacattaagcgaactagaagcaaggttaacaggttttggtttctttagatgtcatcgctcgtaccttgtgaatttacaaagagtgcgagaagtgattacttggactcgtaacagttttagcttaattttagacgacgaaagaaaaagttcaatcccgctttcaaaaggacgaatggatgaattaaaaggtgttattggactataaaagtgctccaataagctcaatatgcgattcattcaccggtaaaaatactccttttaccggtattttaatgcgcctaccctttgtttttcatatgattgagtcaagaaaagcgaaacaaacgaacgaaaagcgctaaagcgactttcatctataaagaagaaaaacaaaggggatgaagaaatgacattggcaattgaaatgaaagatgtaatgaaaagtttcagtggaaaaacggcacttcgaaatgtaaatattgaggtgaagcaaggagagatattcggattccttggaccgagtggatctggtaagacgacaacagtaaaaattttaacttctcaattgcttcatagtgttggaacggtaagagtattagggaaagatattacaggaccaagtagcatcgattacaaacgaattggtattttaacagataacagcggcttatatgaaagacttagcatttatgataacttactattattttgtgacttatacgattgcaaaaaagaacgaatcgatgaagtactagcacaagtgaatttattagatgataaaaaaacaccagtaaaaaaattatcaaagggaatgaagcaacgcgtcacactagcaagagcaatccttcataaaccagatatcctcttcttagacgaaccaacatctgcacttgatccagtaaacgtacaaaacattcataaaatcttaaaagacttaaataaagaaggaacgacgattttcttaacgactcacaacatggacgaagcagaaacgctttgtaaccgcattgccttcctgtgtggcggagagattgtagcacttgatacaccggagaaccttcgcttacaatacgcgaaagatcaaatacaagtcgtgttaaaggataagaagaaagaaacggtacaaaaagatgaattaggtgcaaaacgtatttcagaatggatgaacaaaggagaattactatccattcattcacacgaaccaactttaggcgatatctttattgaagttactgggaggggattataatgacattttcaatgagacgtgtatcagctatttttagaaaagaagtacaagattttaagacaaattcacaagtgttgttaatggcatttttaccaattatactttcatttttgtttagcagatttggagtgggaaaggaaatgttaggcattactactataacggccttcctatttgtcgcagggtttgttcaatctatggtaattgcagaagaaaaagaaaaacatacattgcgtgtattaatgctatcaccggcatcttcggttgaagttctacttggaaaaagtatattaacagtatgtttgacattgggcatttgtattgtgaacttatttattttggatcaattcagtggaaatctattattgctaggatttattttcttatgtggaacaattttatttattgtgattggaacaatgattggattgttagctgcatctgtaccacaaacatcaataattggaatgccgatattaatgacgatgtatttggctgtacagtttgagccaatggttgaaaataaagtaattaagacgatgattggatatcttccaacatctcatattgtgaaagcacttaacagtttagtaggtggggcgggatttggtagtattagtgggcatgtattaaatgttgcagtttggcttattatatcgctctttgtatgtttaatcgtatataaaaagaaacaattagattaaaaactgagccaaaagtgctcagttttttcttttttctatcatttcctcggaaattttacaattcttatacatatttttacagattttgtcgaaaagtaattagttatacgttgtataggatacgtgaatattgttcaaaatgattgctgaggtgatgatggaatgcgaggaagaaataataaaaagtcgcaaaaggtagtacatttatttcaaaaaagatgggtgtttccggcactatacattgcttgtgcagcggtaatcttaatggttgcgctatggttccaaggagctaatccgaagaagactccaaaccacgatcaagcaacaccgtatacacaatcggaagatccagcagtaccagtaacaaaatcttcagaagtagtgaaaatgccagctgccgcgaatgcggaagtagtcgtacagaagaaattctatgaagatgcagcaactgaggcggaacaagaaaaagcacttgtcttttataacaacacatattccccgaataaaggaattgacattgctgcgaagaatggaaaagaattcaatgttgctgctgctttaagtggtacagtaacgaaagctgaaaaagattcacttcttggttatgttgtaacagttgatagtggaaatggtgtagcggtatcttatcaaagcttaggcagtgtgaaagtagaaaaaggtgcaagagttgcacaaggtgaagtattaggaacatccggtctaagtgcaatgaataaagaggcaggttctcacgttcactttgaagtacgtaaagacaatgtggctgtgaaccctgaacgttacttaaataaatcagtaacagaaattaaagctgatgcaggtgctgcaaaggctacgaatgcttctggtaaaaaagctgatgacaaatctcaaaaagaagagaagtcaacgagcacgaaacctgaaagtaaaacagaagacaagtctcaaaaagaagagaaatcaacaagcggttcaactagtgacaaaaaagaagaaccgaagaaagaagaaaaatcaacaaatggttctacagaatcatctaacgattcttcttcacaagaataatgaagtgaaaaaatcagttcccactaggggagctgatttttttatttttatataaaaatactcaatttcgagaaaaaagttgcaataacaaggaaaaatgacgagattctcgaatatatattacaaaagggaggggatactgtgtcatttttgtttgttctgtcgactgctattattttattgtttgttttattcactttatattattacattgccggtaagaaagaggttccccaccatcaattgttagaagaagaattggaacgagaagaatgacaccttatatataaggtgtcattttttttcgctataatagtcagttttaacgtatttctcacaaaaaaacgtaatttttcttaacttagtccgcaaaaatagtgaacatgtagcatatatcagtagtgcgggcaatacaatggtataaaccaaagcaaagagagtgtttgaggtgagaaatcgtgaatcatttcattataaatccaagaatgtttaacgcttacaaacagcactcacacttacttcttagtcgtatgcagcgaggctcatttcacccttctcacatccaaattagggaggcgagtggtgtgcacgattacatcaaagagagaactatcaagattggtaagtatatcgtggagacaagaaagacagtgcgtgtcattgcaaaggaatttggggtatcaaagagtacagtccataaagatttaacagaacgtctaccagaaattaatccagagctcgcaaatgaagtgaaagaaattcttgattatcataagtctattcgtcatttaagagggggagaagcaacaaaacaaaagtatagaaaagaagatgtagagaagcctgtacgtcaataatgttacagtagcaaacattccgttcacattcggtaatatttttcagaagaattctttttgcgaatattacgtttctgttaaatttatgataaaatcagaaattaggtgaaaagaattcgggtgtaacctgattttgaatatcgaggaggaaaaaacgggaatgtttgcgcgagatatcggaattgacctaggtacggctaacgtattaattcatgttaaaggtaagggtattgtattaaatgagccatctgttgtggcaattgatcgtaatagtggtaaagtattagcagtaggtgaagaagcgagaagcatggtgggacgtacgcctggtaatattgtagcaattcgtccacttaaagatggtgtaatcgcagactttgaaattacagaagcaatgttaaagtatttcattaacaaattggacgtaaagagcttcttttcaaaacctcgtattttaatttgttgtccaacaaatattacatcagtagaacaaaaagcaattcgtgaagctgctgaacgttcaggtggtaaaacagtatttttagaagaagaaccaaaagtagccgcagttggtgctggtatggaaatcttccaaccaagcggtaacatggttgttgatattggtggaggtacaacagatatcgctgtactatctatgggtgatattgttacctcttcctctatcaaaatggctggcgataagtttgatatggagatcttaaactatattaaacgtaagtataagctattaatcggagaacgtacttcagaagatattaaaattaaagttggtacagtattcccaggtgcacgtagcgaagaacttgaaattcgcggacgtgacatggtaacaggcttaccacgtacaattacagtatgctctgaagaaattacagaagcattaaaagaaaatgcagctgttattgtacaagctgcaaaaggtgtattagagcgcacaccaccagaattatctgcagatatcatcgaccgcggtgttattctaacaggcggtggagctttactacacggtatcgacatgcttctagcagaagaactaaaagtaccagtattaattgctgaaaacccaatgcactgcgttgcggttggtacaggtattatgttagagaatatcgacagattaccaaagcgtgctttgagataatttgaaagaactaaggctaatgccttagttcttttttgtttttatatttttttattttgtttttttgcgaaaatggaaggaaaatagagaaatatgaaggaaacaggtaaaatattcatatatatggttaaatttaatatttccttaattgaaaacgtttataatataatgagtcgaatacgacattaaggcaaataatgtttcaatacatattgcctttccctaatttgggcatacactcttttccacctccgtgtcagttgcaaaaatgtgcaactattttaatggaatagagtgtgtgcattttttttaggaagttgtactaaatataaaatgttactttgtaatgacaaacaataaacaaaatgggataatagcaatatgtccaagtggtaagaccaatattacaaaaggggcgattgttacatgctaaatatagaacaaattaaagaaatcattcctcaccgctatccatttttacttgttgataaaatattagaagtagatgaaggaaaaagagcggttgggattaaaaatgtatccgcaaacgaagaattctttaacggacacttccctgactatgcagttatgcctggtgtacttattgtagaagcattagcgcaagtaggagcagttgcagtattaaagaaagaagaaaaccgcggaagacttgctttctttgcaggtatcgacaattgccgtttcaaaaaacaagtacgcccaggtgatcagcttcgtctagaagtagaaatgacacgcgtacgcggcccaattggaaaaggaaaagcaatcgcaacagtagatggtgaagttgcatgtgaggcagaaattacatttgcgattggtgataaaaaagaatagatagtactgaaaaatctccttgtgaaaagacaaggggattttttaatttctgctatataacgatgaaacaataatatacaaactaatcagaaaataacttgtaaatagatggaaattaccatatacttactttagtatttatctagaaaacaggataagtgataaaggtaataaagaaataagggcattgtcatattgttaaggtacttaagtaagacaaattagaatgttattgattatgatgagatatggggaaatcagcaaaaatattaattagacgtatgaaatcgagcataagagagagaaaagggaaatgtcgcatttcacaaaaggagattatgaatatgttcgggagaaagaaaagaaaaccattacgacaattaattacacataaagagcctaaatcgcgtattacagaacaataccgtaacattcgtacaaacattgagtttacatctgtagataatcatgttcgttctattattgttacttcggcagatccaggtgatgggaaaacaacgacaatctcaaacttagcagttgttttcggacaacaaggaaagaaagttttattaattggagctgacttgcggaagccgacgatacaaaacttatttgccattcatagttcaaatggattaacgaacttattatcaggacaagcaaaacttatgcaatgcattcaaaaaacagatatagagaacgtatacttaatggcagcaggtccaatcccgccaaacccagcagaactattagggagccgggcaatggacgaggcattgctagaagcatataacatgtttgatattatattaatcgacacaccacctgtgcttgcggttacggatgcacaaatactagcgaacaaatgtgatggaatcgtactcgttgtacgaagtgaaaagacggaaaaagataaaatcgtaaaagcgaaacaaatattagataaagcatcaggcaaaatacttggagtcgttttgaatgataaaagagaagaaaaagagcagtatggttattactaaaatagaaacaggccaacaagaaatacttgttggctttttttgtattcttaaatttatttctcaagttacatagcataaaaagcatgatatgataaataatttggagaatcattggaatgtgttgtcatatttaagattattttgtaagattatacttgtttcttgtgaacaaatatagaactaaattattaaaaataaaaaatgtaagatttatatgttataatttttcctatgtgtaaattttagaaagttggaggaacctatggaagaaacaattagtttaaaagagttatttcatatcttaaaaaaacgtttagcaatgatcctcgtaatcgcctttggtgcagctattgtaagtgctatcattagcttcttctttatgacaccaatctatcaatcttcgacgcaaattcttgtgaatcagaagaagcaagagggtgcaatgttccaagctggtgaaattcaaacgaatattcaattaacgaatacatataaggttatcattaaaagtccagtaatcttagaacaagtgaatgaaaaattaaatttaaatatgacatctcaagtgctaacaggaaagattaatgttgcgaatgaaaaggattcacaagtaatctctgtaacagctgaggataaagatccgaaattagctcgcgatattgcgaatgcaactgcagatgtatttaaaggtgaagttgcaaaaattatgaacgttgataacgtaacagtattatctaaagcagaagttgcagaaaatcaatctccaattaaaccgcgtccaatgttaaatgtggcaattgctttcgttgttggtttaatggcttcagttggtcttgcattcttactagaatacttagataacacagtgaaaaaagaagaagatgtggaaaacttacttggcttaccagtattaggaattgtagctcgtatggatgaagaaacaatgaacgtgaaatcacacgctccatcatcaagaaaagtgaggggacaaacaattggctcttaaattatttaaaaagaaaaagaatcatcgtcaacgccgtcaattaattgctcatcaacaaccgaaatcaccaatttcagaacaatatcgtaatattcgaacgaatattgaatttgcagctgttgatacgaatttacattcattaatggtcacgtctgcaaatccaagtgaagggaaaacaacaacgacagcgaatatggctgttgtgtttgctcaacaaggaaaaaaagtattattaattgatgcagatatgcgtaaaccagcaatgcatcaaatgttccaagtagacaatatttttggactaacgaatgtattaacacatagtgaacgtttagagaaatgtgtgcaaacaacactagttgataatctacactttttagcttgtggtccaatccccccaaacccagctgaattgttaggttcaaaatcaatgaaagaacttcttggacaagcatacagcatgtacgacttagttatttttgatatgccgcctattttagctgtaacagatgcgcaaattatggcaaatgtatgtgatgcttctattcttgttgttcgtagtgaatcgacagagaaagaaacagcggtaaaagcaaaaggattgttagaatcggctaaaggtaaattgttgggcgttgttctaaacgaccgtgaacgtgaacaaggcctatactactactacggtgcaaactaattttaaagtgagatatggtaaaaacatatctccttttttcccttgaatatgagcgatatctcatattcaagggaaaaaagatctttataggagagagggaggatgaaacaaatgatagatttacattgtcacattttaccggggatcgatgacggtgcacagacagtaacagatagtttagcaatggcacaacaagccgtttcagaaggaatacataccattgtcgcaacgccacaccatcaaaatggaaaatatgtaaatgaacgtacctcaattattcatcatgtaaaacaactaaatgatgaactacaacaacataatatgccacttaccattttacctgggcaagaggtcagattatatggcgatttattagaagactatgaagctggtaaaatcgttactttaaatgaaacaaataaatatatattcattgaattcccatcaaatcacgtacctcgttatgcagaacaactactatatgaattgcgcgtaaaaggaatgattccaattatcgttcatccggaacgtaatgccgagttaatcgagcggccagataagttatataatcttgtaaataaaggtgcattaacacaagtgacagcaggtagtttacttgggaaatttggaaaaaaaattaaaaaattctcactacagcttgtagaacataatttaacacatatgatcgcatcagatgcacataacacgacatcaagaggatttcatttagcggaaagctatgaactaattgagaaagaatttggaatgagtgttatgagtgatttgaaagaaaatccgtacttattaattagcgggaaggcaatttataaagaagatccagaacaaattcgtcgtaaaaaattgttcggtattttttaaataaagaattggtgatgtctcctaaccgttatcaacggaggcactcggtcgtgctgtgggtagaaatttttatttcgaacctaccttagacgcttgtcgtcgggagtatgacgtgaggatgggttggatgcccataatttatttatgttagaaactctacttatggagttgtaaagacgaccctataagtagggtttttgttattgttacatgtggatataataatatgtttgggggtactagatttgaaaaaagtaagaaaagcaattattccagctgcgggactggggacaaggtttttaccggcaacaaaggcaatgccgaaagaaatgttaccaattgttgataaaccaacaattcaatacatagtagaagaagcgatagaatcaggaattgaagatattattattgttaccggaaaaggtaaacgtgcgattgaagatcattttgatcattcctttgaattagagcaaaatctcttagaaaaagggaagtatgaaatgcttgagaaagtacaagcttcatcaaaaattaatattcattacataagacaaaaagaaccaaagggtctaggacacgcagtgtggtgcgcccgtaaatttattggaaatgagccatttgcagtattacttggtgatgatattgtgcaagcagaaacgccatgtttacgtcaattaatggatcaatatgaaggtacacaatcatctgttatcggtgtacaaacagtaccagaaaatgaaacacatcgttacggtattattgatccagttgaaaggaatgatcgccgttatcaagtacgccaatttgttgaaaagccagctcaaggaactgcgccatcaaatttagcaattatgggacgttacgtattaacaccagaaatctttatgctccttgaagatcaacaaacaggtgctggtggggaaattcagttgacagatgcaattcaacgattaaatgaaattcaacgggtatttgcatatgattttgaaggaaagcgttatgatgttggtgagaaattggggtttattaagacgacaattgaggtagcattacagcataaggaattaaaaaagcaattaataaaatatatgaatgatttagtacataaagaaatcaatgaataagattataagggagagggaatatgaagactggtgaaaatatagcgagagaatatcaagttacatcagatgatcaaatcgttcaagtcgaaaatagacaatccaagttatatttagggagtaagtatatattagatgttatattcgctttactaggcttgattatattggcacctgttatgttgatatttagtttactaattattttagaatccccagggtcgcctttctatttacaagaaagattgggtatgaatggtaggaagtttaatgttattaaattacgttctatgagaaatgatgcagaaaaaaatggtgcaaaatgggcagagaagaatgatccacgtattacaaagataggattatttattcgtaagacgaggattgatgagctaccgcaattatttaatattttaaaaggtgaaatgtctcttgtaggaccaaggccggaaagacctatgtttactgagaaatttgagcgtgaaattccaggttttaaaaagagactagaggtaaaaccaggactgacaggatgggcgcaagtaaatggtggttatgaaattacaccgagagaaaagttgaggctagatatatattacattaacaactccagtttattgttggattttaaaattatattaaagactattaaggtagtatgcacaggtgacggagctagataatgtatcttataaatacaggatggtattagtatgaacttacaattaattcttaaaaatgcttcatttttatttgtaggaaatgtgatggtacgaatgttaaccgccatttcagcaattgtgatagctaggtatcttggggcagaacaatatggtattttaagtattgcattagtattttccacttttgcaagttcaatgacagatctaggattaactcatacatttattagggagggtaccaaagctgataaagatatatctaaacttttaaatagctatttggtaacaagattattcatttgtatattctcctctgtaattgtatttattctagtaaattttatgtatagtcagaaagaaatgaaacaggtaattttcttgatggtaatccctacaatatttggtgcagcactacaaaatgtaggagcggtatattatcaaattatcgaaaaaatgaaatatactgcaattattcgaatcatggcaggcttaatttctgtcataggtcttcttattggagtttattttggatatagtcttttaatggtagccttaacttatgggctatgtagtattttagggggtattataagtatctcttttgtcattaataaaattaaattgcataaaggattagataattctattttaaatgggttaagtgcttttacgttaactgcttttttaacaatacttatgcctttaatgggacctattgctttagaaaaggtatctagtttagaacaggttggctattttaacgctgcattacgtatcccctctgttctatatcaaattccaggtattgtagcagcagctttttatccagttttgtttaagcttattgatagaagtgagctaaaaaaacatggagaggtaatagttatcgaaatcaagttaatgactttattgtctttaattatggttctacccataatactatttccagaagaaatttcagtttttctgttaggggaaaactggataggaattgctgaaacgctttctattttatctattattgtttttattcaatcaattaactttcctttagcggatagtttaacaactaaaggtttgcaaaaatatagatctattgcattattaattagttttgggacaggtatttttgcgtactcgtattttggaaagttatacggtagtttaggagcagcaatcgcagctgttttaatagagattgtactattactgggtttaataatttttaataagcagggaatatttaccgtgtttaggggtagttctaaaagtttattaagtttaatttttttgtatgtcataaataaattatttctaggaaatattaatatatttatctcattagtaataagttatctcattgttttaattgttattctatcagaaaaagatttaataaaaaatatgattcaaaaaaagaaatctattatgtagaggaggctataaatgtctgttcctgagatatctataataattcccacttataatgtagaagaatatatagaggaagcgttaagttcagtacttaatcagagttttaagcaattagaggttatagtaattgatgatggatcacgggataaaacagttgaaatcattcaatctttacaagatgagcggataaagctatatgaaaatggttctaaccaaggtccggcttattcgagaaactttgggatttctaaagcaaaaggtacttggatagcttttttagatggagatgactggtgggatcaagaaagaataaaagagttgcttaattttgctagaattaaagaagctgacatgatatttgatgatattttcctaatatatgatgggcatgtaagtccgtatgcaacacaatgtcaaaattacaaagaaaagcttgaatctagccttaatattaccccagagttattagtagagttagatttaggaatgcaaccgataataaaaagaaatctattggagaaaaaaaatataagatttaatgatcaattgatatttggggaagattatgttttttatcttgaggtactatgcgagtctaataaatgttatttttataataaaccgttatacttttataggcagaggggagattctcttacaagacaaaagacaaagagaatccaacagttaatacaagcaaatagggaactgttaaaacatgaaaaatttcaagggaataaaaaattaattaatcaattgcaaggtaggatggtaagactctcaaatctaaatttatattatagcttcattgaaaaaataaaagaaaaagatattaagggtatagtgaaaaatatatatttaaatcctaaggtaattttaatattaataagccgtttaccaaaggtcttaaaatacagactagggaaatttattaaaagtagaggttaaaatatgaaagacaaaagttttgtacttcaaaagatggatagtaagaattcttatgtttataactctattttcataatgttaatttcactattcattttatatgtgccggtagtaaatagcatgcaaccattaataaaagcaccatatagttattatgctaattttttaattatttttgtgctgtggttatttaattttttaaatagtaaaaatgctaattttactaaagaatatttgcaatcaatgggctgtttatatgtcttaggtctttactgtgctatttcaagtttttggagtgaaatacaatttgaaactttatggagaacatttataatttttggtcctattttcgcaatggcatacattgttaatgtagatcgaatgattgaaaaaacattgattgctagttataaaattcaaatgttagtaggtttatttttagctatcttaatgatatttattaaaatttttggattaatgatgtggtttaatgacgaatattcactaaattatattaccttaggtcctataagaatagaacaggcagtttattattcaggagcgacactgagattttcatctattacaggaaatcctaacatattatcatacatactattaatatcattagcgaccactctgattttgtttttaagacagtcaataaaaactttctattttataatatcatttttaattcaatgttatgccttgtttttaacatattcaagaacagggatattggcatttggaatcttcttatttctgttcttttggttaaataatagtaggggaatgaaccgtttaagaaaaaacatttggaaattcatgagaatatctttgattctaagtgtttttgcaggaggaataatagcccttttattacagggaagtaaccagcgattaagcttagatttggcaggaagaggaaaagcatgggatttattagccgatgttatttcaaaccatttctttttggggatagggttcaattctagtcaagagtttttaagagaaatgaatgttggagtaaatcatgcacatagtctatatttaggtattacagctgagataggggttatcggtttaggattatttctattttttgtctgttgtacattagggattttaattcaacagtttcaaaaatacaagaacaacttagagtataaaaatcagtggctcatgtattctggaaatattgcaataatagtagctattttattccatcagggtacagaattctctttattaagaaataattatctaaactttttatggtttttctttatatttactacaataaagttaggtagtgatttaattaaaagagagaacggaggagatcctgttgcaaaaaactttagtaataggggttaaagtagagaacatagaaaaagaaatgtctggtccacaaaaggtgttcaatagtattgttaatgatatagataatgaggatataattgttttaggaagggatataagagcatgtataaaagggatattttctagagatgtaagtaatttgcatatatttggttttacacgatcaaatgcattgttagttataatagggaaaatattaagaaagaatattctttataccgcaaatggcttagtatcgcgggaaaatttgcacttctctaatctgagaatttcttgtaaaatggcggaatttattactttgaagcttgcagatggtattatatgcgtgtcagaagggttaaaggaaatgattataagtgattataaaataccaaaaaagaaattgaaagttattccaaatggcgtttccgaaaaatttctgactataaagccagacaaaaatatttttaacgaacttattcctttagaaaaaagaaaaaagattatatttactgcttgcggaacttttaagtacaaaggaattgaacaattagttaaagttgtgaatgatataaaaagggatgattttatcttagtaatcgctgggccaaagggaaatgttcatgacaaggtaatgaatatgatggatcctaaaaaggttatatatataggtaatttaaatcaaagtgaattgataagtgcttattattattcaaatctttatatccaaaatagcttatatgaaacttttggcttagcaccattagaggcattagctgttggtacaccagttatagtaagtaaagatgttcagatgaattatttgcttaaaaatacaagattagaacactttattataaataatgacgaggagctgtctgaaaggattaatttaatattagataatcctaatattaaagaggatttaagtatcagtgctaagaaaatagctcaaaataatacttggcaggatatacgtcagcaatataaagaattatggagcgttattaattaagtgataaaagtatggtgagaaaattgggaaatgaatatttagttaatgttatagtacccacgttaggaaatagaattgagtatattaaacgcttatttaatagtttagaagagcaaactattaataatattaaagttattattgtgtctcaagaaaatcatgatagaattagcagtttattaatgaaatacaattttaattaccatcatgttatattaagcaaaaaagggttatctcatgcaagaaataaaggtttagaatatgtggataatggtattgttacgttctctgatgatgactgctggtatcctaaaaacgcatttgaaacggttgttgaaggatttaaatataggaatatcgacgcgctaagttttcagatatttgaccccgaaattcaacaatattataaagaatatccacaagctcctatagaaaaattaggtattcgcggggttttaaaaatttcatcaatagagttctttattaatttaaataaaattgatattggagatttgaagtttgatgagagatttggtcttggggcaaaatatccatctggtgaagaaaatatcttgctcgcagatttattgaaacagaaatatagtatagcttatgttaatcaaattattgtttttcataaaaagaaaacatcagaaaataaactaattgattctaatacttttacaggaaaaggaccattatttaaaaggatgagaggaactattccagctatatgtatgctaacaattttctttgtaaaaaaatttcatttaactgaaaaaccaattcgctcattcatcaaaagttttaaagagctgttaaaattttgatgaaaatatcaaagaaaatctgaaggagtagtattgaaatggaaataaatctaagtgagattgaaatagggaatcaatcacttgtgtcaattattatcccatcatataatgcaagttcttttattaaagaaacaatccaatctgtccaatctcaaacttatacaaattgggaaatgattattatagatgatgtttcaaaagataatacttgtgaattgataaaagaagagattaagaaagataatcgtatacgattaattgaattgcagaaaaattgtggagcagcaattgcgagaaacacgggcattaataatgcaagagggaagtatgtagcttttttagatagcgatgatctatggctacccgaaaaattagaaaaacaattgacttttatgcagaataatgatgtagctttttcgtttacgggttatcaaattatgaatcaagatggtacccttactgataaaattgtacatgtgccagaaaaaattaattataatggattattaaaaaatacaataattggttgtttaacggtgatgttggatattgagaagctagggaaagtacaaatgcctaacattaggacccgccaagatactgcaacatggttaaaaatattaagacaaggtcattatgcctatggcttagatgaggttttatcgaagtatagaaaagttgaaaactctatttctagtaaaaagttcaaaatggctaaaatgaattggaaattatatagggaaattgaagggttaagtatcctaaaatctgcatggtgctttataaattatgccctaaatggagttgtaaaacattttgttaaataagttttaaaagcctttttctttaaggggctttttttattgttaataaataaggaggataaaaaatgaatattgctattttcggaacaggttatgtagggctagtaacaggggtttgtttatcggatattggacatcgtgtaacttgtattgatattaatgagaataaagttgcgaaaatgaaagaaggtatttcaccaatatatgaacctggtttagatgagttgatgagtaaaaatattaatgataatagattgttatttacaaccgattgtcgccaagggattgaagaagcagatgttatttatatagcagtaggtacgccacaacaaacagatggttcggctaatttacaatatattgagcaagttgctttagatattgctaataatctaaaaaaagattcgattgtagtaattaaaagtacggtcccagttggtacaaatgatcatgttaaaaatttaattcagcaaaatttgaaagcagatgtgaaaatcaacatggtatcgaatccggaatttttaagagagggttctgcaattcatgatagtttctatggagatcgtatagttattggggctgatgatgctaaaactgctgatgttatggaagaagtgaataaaccttttaatgttcctgtttttaaaacaacaattagaagttcagaaatgattaaatatgcagcaaatgctttcttagctacaaaaattagctttattaatgaaattgctaatatttgcgaaaagttaggtgcggatgtagagcatgtagctaatggtatgggattagataaaaggattggtacacaatttttaaaagcaggtatcggatatgggggctcttgtttcccaaaagatacacatgctttaatacaaattgctggtaatgtcgagcatgattttgatctgttaaaatcagttattacagtaaataataatcagcaggcatcgctcgttgaaaaaataaaaaatgtattaggtgatatggaaggaaaacaagtggctatgcttggtttagcttttaaaccaaatactgatgatatgagagaagcggcatctattgttattgcaaatgatttagtaaaaatgggtgcgaaggtcgtagcttatgatccaattgctactgaaaatgcaaagaaagtattacctaatgaggttcaatatgtgccctctgttgcaggagcagttaaaaatgccgatgtaacacttattgtaactgaatgggatgatataaaagaattccctattgaacagtatatcaaattaatgaaacaacctattatttttgatggtcgtaattgccatggtttagaatatgtgaaaaagtttaatgtagactattattccgtaggaagaccagctgtagttcgtgaaaaagtttctttataattagtgggtaatttataggatgaaaatctgtaagactaatttttataaataaagaaattttttattaacctagctattttaaattctagctagattaatgtttacatgcttattataaggatatgtagtaatggggaggtttgttaattatggcagtacttgtaacaggtggagcaggatatattggtagtcatacatgtgtagaattactgtgacatgtggagctgacgaatactaatagatcgaggacttaaccatataatatgtagcaatgttatctagttttgaaggaatatgccttcatagtttggtgatgatggcagagaggtcacacccgttcccataccgaacacggaagttaagctctctagcgccgatggtagttgggaccttgtccctgtgagagtaggacgtcgccaagcaaaaacctaagtcgtttcgacttaggtttttttgtgtttatttttatttaccgaaggctataatccataaatttaataaagctaaagacgaaaaaagaatgaaatagagactgtttaaaataatagcaatgattttttgtgttcctgattttcctaatgccactaaagtaatacttaaaataggacaaattattactatcataagtatatattttaaataatgagatgctataaataagtatttaataattacagaaattactgcaatagagaaaaataaataggataatagcatagttctttctttaacagttatcctctttagaaattaaatcgttataataatacaagagtgtatatattttgatttaaaacatactgaagtgccatttaaacgattatacgtaaaatagatctctagaaatatatattctaattcccttttcttcttgcatatagttgcaattcttcttttgaatataactaaaacacgaacgttattgactactaataaaaaaacattcgattatttattgacattgtttatgaaatattgttaatataaccatagaaacaataatataagacctcatataatcgcggggatatggcctgcaagtctctacctaacgaccgttattcgttagactatgagggaaagtcactcggtatttttctattcacaagggatacgtatgcctgagtagagcgctttctctcatagtaaaagagaaactgttctatttcaggctttttttatttgaatcggggggattctaatatgaaatcactagttggagtcataatgggaagcacgtcagactgggaaacaatgaaatatgcttgtgacattttagatgaattaaatataccgtatgagaaaaaagttgtatccgctcatcggactccggattatatgtttgaatatgcagagacggctcgtgaacgtggattgaaagttattattgctggagctggtggagcagcacatttaccaggaatggttgcagcgaagacaaatcttcctgtaattggagttccagttcaatcaaaagcattaaaaggcttagattcattattatccatcgtccaaatgccaggaggtgttccagttgcaactgttgcaattggtaaagccggttcaacgaatgctggattacttgccgcacaaatacttggatcattccatgatgatatacatgatgcattagaattgagacgagaagcgattgaaaaagatgtgcgtgaaggtagtgagctagtatgacgaggatcattttacctggaaaaacaatcggtattattggaggcggccagctaggaagaatgatggcattggcagctaaggaaatgggatataaaattgctgttttagatcctacaaagcattcaccatgtgcacaagttgctgatattgaaattgttgcaccatatgatgatttaaaagcaattcagcatttagcagagataagtgatgttgtcacatatgaatttgagaatattgattatagatgtttacaatggcttgaaaaacatgcgtacttaccacaaggtagtcagttgttaaatacaacgcaaaatcgttttacagaaaagaatgcgattgagaaggctgggttaccagtagcaacgtatagattagttcaaaatcaagatcagcttacagaagcaattgctgagttatcattcccttccgtcttaaaaacgacgacaggtggatatgatgggaaaggacaagttgttttaagaagtgaagctgatgttgagacagcaagaaatcttgtggataaagcagaatgtattttagagaaatgggtgccttttgaaaaagaagtatcagttattgtgattcgtagtgtaagtggtgaaacaaaagtgtttccagtagcagaaaatattcatgtaaataacattttacatgaatctatcgttccagctcgcattacagaagagctttctcaaaaagcaattgcttatgcaaaagtacttgcggatgaattagaacttgtgggaacactagctgtagagatgtttgctacagataatggtgagatttatattaatgaattagcgccaagacctcacaattcaggacactatacacaggatgcatgtgagacgagtcaatttggtcaacatattcgagcaatctgtaatttacctctaggagaaacaaatttgttaaaaccagttgtcatggtaaacattttaggcgaacatatagaaggggtcctaagacaagtgaatagattaaccgggtgctatttacacttgtatggaaaagaagaagcaaaagcacagcgaaaaatggggcatgttaatattttaaatgataatattgaagtcgctctagaaaaagcgaagagtttgcatatttgggaccatcaagaacaactgttggagggaaaaagatgattagtcgttatacacgcccagaaatgggtgcaatttggacggaagagaacaaatttaaagcatggttagaagttgagattttagcttgtgaagcatgggctgagcttggcgatattccaaaagaagatgttaagaaaattcgtgagcatgcatcatttgatattgatcgtatttatgaaattgaaaaagaaacacgtcatgacgtagttgcattcactcgtgctgtatcagaaacgccagcattaggtgaggaacgtaaatgggttcattacggtttaacatctacagacgtagtggatacagcattatcttacatcttaaaacaagcgaatgaaattatattaaaagacttagagaactttgtaagcattttagctaacaaagcgaaagagcataaatacacaatcatgatgggaagaacacatggtgttcatgcagaaccaacaacatttggtttaaaacttggtctttggtatgaagaaatgaaacgtaacgtagagcgtttcaaacaagctgctgatacagttcgtgttggtaaactatctggtgcggttggtacatatgcaaatatcgatccattcgtagaaaaatatgtttgtgaaaacttaggattagaagcagcaccaatttcaacacaaacattgcaacgtgatcgtcacgcacactacatgtcaacacttgcactaattgcaacatctatcgaaaagatggcagttgagattcgtggtttacaaaagagtgaaacacgtgaagttgaagaagctttcgcaaaaggtcaaaaaggttcttctgcaatgccacataaacgtaatccaattggttctgaaaatatgactggtttagctcgtgttatccgcggttatatgatgacggcttacgaaaatgttccattatggcatgagcgtgacatttctcactcttcggcagaacgcgtaattttaccagatgctacaatcgcgttaaattacatgttaaatcgctttggtaatatcgttaaaaacttaactgtatacccagagaatatgaaacgcaatatgacaagaacatacggcttaatttattctcagcgcgtaatgcttacactaatcgacaaaggtatggtacgtgaagaagcttatgatatcgtacagcctaaagcgatggaagcttgggaaacacaagtacaatttaaagagcttgtagaagctgatgagcgtattacaagcaagttaacacaagaagaaattaatgaatgcttcaactatgagcatcatatgcaacacgttgatacaatctttgaacgccttggattaaacgaagcgtaaaatttcatatggcacagaatagagtcattctgtgccattctttataaaaacattattcacatttttcaaactacagggggcttgcgaaatgcaaaagctagaattgctgtatgaaggtaaggcaaaaagaatttatcgtacagaatcagcagatatggtttgggtagagtacaaagatagtgcgactgctttcaatggggagaaaaaagagacgattacagggaaaggtcgtttgaacaatgaaattacaactttattgttcagaaagttacaagaagtgggaattaaaacacattttgttgagaagttatctgaaacagaacaacttgttaaaaaagtgagtattattcctttagaagttgtcacaagaaatgtaattgcaggaagtctttcaaaacgattaggaatggaagagggaactgtacttgcagaaccaatcgtagaattttacttcaaagatgatgatttaggagatccgcttgtaacggaagatcatattcgtgtattaaacgttgcatcaccagagcaagtaagcgtattacgagatatggctctacaaatcaatcaagtgttgattgatcatttcgcaagctgtcgtgtaagattagtagatttcaaattagagtttggtgtaacggaagaaggagaaatcattttagcggatgaaatttcaccagatacttgccgtttatgggatgaaacgagcaatgaaaagtttgataaagacgtattccgtcgcgatcttggaaatttaacagatgcttatgaagagattttaaaacgtttagggggaatttcacatgtataaagttaaggtatatgtaacattaagagaaagcgtattagatccacaaggaacagcagtaaaaggagcacttcatagtctttcattcacagaagtacaagatgttcgaatcggaaagtacatggaactaacaattgataaatctgtatctgatttagatagcaaggtaaaggaaatgtgtgaaaaactattagcgaacgttgtaatggaagacttccgttatgaagttgaggaggttgtcgcacagtgaaatttgccgtaatagtatttccgggttcgaactgtgatgtcgatatgttccatgcaattaaagatgagcttggcgaagaagtagattacgtttggcacgatacagagaatttagatgaatatgatgcaattctactaccaggtggattttcttatggtgactacttacgctgcggtgctatctctcgctttgctaatgcaatgaaagcagtgcaaaaagctgctgagcaaggaaagccgattttaggtgtatgtaatggattccagattcttgttgaatcaggattactaccaggagcgttaatgagaaacgaaaacttaaaatttatgtgtcgcactgttcagttgcgtgttgaaaataatgaaacgatgtttacatcacaatatggaaaagatgaagtaattaatattccaatcgcgcatggtgaggggaattactattgtgatgaagcgacgcttaaacaattaaaagagaacaatcaaatcgcattccgttacgtagaaaaccctaacggtagcgtttcagatattgctggtattgtaaatgaaaaaggaaatgtacttggtatgatgccacacccagagcgtgctgtagatgaattacttggtggtgctgaagggttaaaagtctttcaatctatcttaaaacagtggagggaaacatatgtcgttaatgcttgaaccaaatccaacacaaattaaagaagagcgtatatatgcggaaatggggctaacagacgaagagtttgccatggttgaaaagattttaggtcgtctgccaaattatacagaaacagggttattctctgtaatgtggtctgaacattgtagttataaaaattcgaaaccagttcttcgtaagtttccaacgacaggtgagcgcgttctgcaaggacctggagaaggtgctggaattgtagatatcggtgataatcaagcagttgtatttaaaatggaaagtcataaccatccttcagctattgaaccatatcaaggagctgcaacaggtgttggtggtatcattcgtgacgtattctctatgggagcacgtccggtagctctattaaactcacttcgtttcggtgaattacagtcaccacgtgtgaaatatttattcgaagaagtagtagcaggaattgcaggatacggtaactgtatcggtattccgactgttggcggcgaagtacaatttgatccatgttatgaaggaaatccacttgtaaatgcaatgtgcgtaggtttgattaaccacgaagacattaaaaaagggcaagcgcacggtgctggtaacacagtaatgtacgtaggagcatcaactggtcgtgacggtattcacggtgcaacattcgcgtcggaagaactatctgaaagctcagaagcgaaacgtccagcggttcaagtaggggatccatttatggaaaagcttcttattgaagcgtgtttagaattaattcaatccgatgcacttgttggaattcaagatatgggtgcggctggtttaacatcatcatctgcagaaatggcaagtaaagcaggaatgggtattgaaatgtacttagatgatgtaccacagcgtgaaacaggaatgacaccatatgaaatgatgctatctgaatcacaagagcgtatgttaattgtcgtgaaaaaaggtagagaacaagaaatagtagatttatttgagaagtatggtcttgcagcggttacgatggggaaagtaacagaagataaaatgcttcgtttattccataaaggtgaaaaggtagctgaagttccagcagatgctttagcagaagaagcaccaatttatcataagccatcaaaagaagcagcatactttgctgaattccaagcaatgaaaatggaaacgccaaaagtagaaaattataaagaaacgttattcgctttattacagcaaccaacaattgcaagtaaagagtgggtatacgatcaatacgattaccaagttcgcacaagcacagttgttacgccaggttcagatgctgcagttgtacgtgtacgcggtacagaaaaaggattagcaatgacgacagattgtaactctcgctacatttatctagacccagagatgggcggtaaaattgcagtagcagaggcagcgcgtaatatcgtatgttctggcggagagccacttgcaattacagattgcttaaacttcggtaacccagaaaaaccagaaatcttctggcagattgagaaatcagtagacggtatgagtgaagcttgtcgcacattacaaacaccagttatcggcggaaacgtatcgatgtataacgagcgtagtggtgaagctgtatatccaacaccaactgttgggatggtcggacttgtgcatgacttaaaacatgtaacaacacaagagtttaagcaagctggtgatttagtgtatgtaattggtgagacgaaagctgagtttggcggaagtgaattacagaaaatgattcacggcaaaattttcggtcaatcaccaagtatcgatttagatgtagaattaaaacgccaaaaacaagtattagaagcaattcaagctggtcttgttcaatctgcacatgatgttgctgaaggtggtttagcagttgcgatttcagaaagtgcaattggtgctaaaggcttaggtgctactgtgaaattagatggagaagcaacagcagcattattcgctgaatcacagtctcgcttcgtgataactgtaaaacgtgaaaataaagaggcgtttgagaaagcagtagaagcaatccaagttggagaagtaacaagtacaaatgaagtaacaattcataatgaagaaaatgaagtattacttacagcaaatgtagatgaaatgagaaaggcttggaaaggggcaatcccatgcttgctgaaataaaggggttaaacgaagaatgtggcgttttcggaatttgggggcatgaaaatgcagcacaagtttcatactacggattgcacagtttacagcatcgtgggcaagaaggcgcaggcattgtcgtaaataatggggaaaaaatcgtcggtcacaaggggttaggtttaatatcagaagtgttttcaagaggtgagctagaaggattaaatggaaaatcagcaatcggacatgtacgatatgcaacagctggtggaagtgaagttgctaacgttcaaccattgttgttccgtttttccgatcatagtatggcgttagctcataacggaaatttaattaacgcaaaaatgcttcgtcgtgaattagaagcagagggcagtatttttcaaactagttcagatacagaagtacttttacatcttattaaacgtagcacgaaagattctttaattgaaagtgtaaaagaggctttaaataaagtgaaaggtgcgtttgcgtatcttttactaactggaaatgaaatgatcgttgcattagatccgaatgggttccgtccgctttcaattggaaagatgggggatgcttacgttgtagcatctgaaacatgtgcttttgatgtagtaggtgcaacatacattcgcgatgtagaaccgggtgaattacttatcattaatgatgaaggaattcacgtagatcgtttcacaaacgatgtagaacatgcaatttgtagtatggaatatatttactttgcacgaccagattctaatattgctggtgttaacgtccatgcagcacgtaagaatatggggaaacgtttagcggcagaagctcctattgaagcagatgttgttactggtgtaccagactctagtatttcagctgcgattggctatgcggaggcgacaggtattccatatgagttaggattaattaaaaatcgttacgttggacgtacgtttattcaaccttctcaagaactgcgcgagcaaggggttaagatgaagctttccgcagtaagaggtgtagttgaagggaaacgagttgttatgattgatgactctatcgtaagaggaacgacaagtaaacgaattgttcgtatgcttcgtgaggctggagcgacagaagttcacgtaagaattgcttcaccacctctgaaatatccatgtttctatggcattgatattcaaacgagaaaagaattaattgcagcaaatcatacagtagaagaaatccgtgaaatgatcggagcagattctttaacatttttaagcgaagatggattagtagatgcaattgggcgtccatatgaagggaaatatggcggcctatgcatggcttactttaatggggactatccaacagctctttatgattatgagcaagagcttttagaaagtatgaaataagaaaagtgagaaaagcttctacttcttttgatgtaggagctagatcctttcttaaaatagcccgccctggatggggagaaattaaaagacgaggtgtaaataacgatggcgaatgcatataagcaagcaggagtagatattgaagctggatatgaagcggtatctcgcatgaaaaaacacgtacaaacaactatgagaaaagaagtactaggcggtttaggcggttttggaggtatgtttgatctatcaaaatttgcattagaagaacctgtattagtatctggaacagatggcgtgggaacgaaattgatgctcgcttttatggcagataaacatgacacaattggtattgatgcagtagcaatgtgtgtaaatgatattgttgtccaaggagcagagccgcttttcttccttgattatattgcttgtggtaaagctgaacctagtaaaattgaaaacatcgtcaaaggtatatcagagggctgtcgccaagctggttgtgcattaatcggtggagaaacagctgaaatgccaggaatgtattctacggaagaatatgatttagctggttttacagttgggattgttgataaaaagaaaattgtaacaggtgaaaagattgaagctggtcacgtgctaattggcttagcatctagcggtattcatagcaatggttactctttagtacgaaaagtgttattagaagatggggaactatctttagagcgtatttatggccgcttagaactacctcttggtgaagaattattaaaaccaacgaaaatttatgtcaaacctattttagaactattgaagaaacatgaagtatacggtatggcgcatattacaggtggtggatttattgaaaatattccacgcatgttgccagaaggaatcggtgctgagattgaactaggatcttgggaaattcagccgatctttagtttgcttcaagaagttggaaaactggaagagaaagaaatgttcaatatttttaacatgggtattggtatggtagtagcagtgaaggaagaagatgcaaaagatgttgttcgtcttcttgaagagcaaggagaaatggctcgtattattggacgtactatacaaggagctggcgttacttttaatgggggcacagcactatgagtagattagcagtttttgcttctggaagtggatctaactttcaatctctcgttaatgcggtagaagaaaaaagattggatgcagaaattagtttattagtatgtgataaaccagaagcacgagctgttggacgggcaaattatcatcatattccgtgttttgctttttcagcgaaagcatatgagtcaaaagaagcgtttgaaaaagagatattaaagaagctagaagaatatgaaattgattatgttattttagctggatatatgcgtttaatcgggccgacgttactagaagcatacggcgggaagattattaatattcatccatcattactaccgagctttccgggtaaagatgctgtcggtcaagcgttagaagcaggtgtgaaagtaactggagtaacaattcattatgtagatgcaggtatggatacagggccaattattgcacaagaagcagtggttgtttctgaaggggatacgagagaaagcttacaaaagaaaattcaacaagttgaacataaattatacgtaaatacagtgaatcaaattgttcagtctgtgaaagaatcaactgttaactaacatacaaccaggggtgaaggataaatgaaaaagcgtgcattagtaagtgtttcagataaaacaggagtagtagaatttgttaaagggttactagaacaagggattgaagttatttcaacaggtggtacgaaaaagttactagaagaaaatggcttacaagtaatcggcatttctgaagtaactggtttccctgaaattatggatggccgtgtgaaaacattacatccaaatattcatggtggtctattagcagttcgtgataatgaaacacatgtaacacaaatgaatgagttaggtatagagccaattgactttgttgttgttaacttatacccatttaaagaaacaatcgctaagcctgatgtaacatttgctgatgcaattgaaaatattgatatcggtggcccaacaatgattcgctctgctgcgaaaaatcataaattcgtatcggtaattgtagatccagtagattatgatattgtgttagcagaactgaaagagaacggtgaagtagcagaggaaacaaaacgtaaactagcagcgaaagtattccgtcatacagcagcgtatgatgcgttaatttctaactacttaacagagcaaatgggtgaagaaagtccagaaacattaactgtgacatttgagaaaaagcaagacttacgctatggcgagaacccacatcaaaaagcaactttctataaagcgccattcgcagcaacgtcttctgttgcatacgcagaacaattacacggtaaggaattatcgtataacaatattaatgatgcagacgcagcgcttagcatcgtaaaagaatttacagaaccagcagtagtagcagtaaagcatatgaatccatgtggtgttggagtaggaactaatattcacgaagcatatactcgtgcttatgaagcagatccagtatcaatcttcggcggtattattgcagcaaatcgtgaaattgataaagctacagcagaaaagttacatgaaattttcttagaaattgttatcgcaccttcgttctcgcaagaagctttagaagtgttgcaaagtaagaagaacttacgtttattaactataaatattgaaaaagcgacaagtgcaagcaaaaaactaacttctgtacaaggtggacttctcgttcaagaggaagatacgttatcattagatgaaagtacaatttcaattccaacgaaacgtgaaccctcagagcaagaatggaaagatttaaaactagcttggaaagttgtaaaacatgtgaaatcaaacgcaattgttttagcgaaagatgacatgacaattggtgtcggtgcgggacagatgaaccgtgtaggttctgcaaaaatcgcaattacacaagctggtgaaaaagcacaaggtagcgcgcttgcatctgatgctttcttcccaatgccagatacattagaagaagcagcaaaagcaggaattacagcaatcattcaaccgggcggatcaatccgtgatgaagattctattaaagtggcagatacttatgggattgctatggtgttcactggcgtacgtcatttcaaacactaatagaggatgtttaaaaagtccggttaagataaccttcgcatgtcgtcgttgcatcgccagtgcggtactcatgtagaaaagctacactccgtgtcctcctggcaaatgcgcctagacctgctcggttctcttaatcctcctttttaaacctttattgatatggatgtttaaaaagtccggtcgagataaccttcgcatgtcgtcgttgcatcgccagtgcggtactcatgtaggaaagctacactccgtgtcctcctggcaaatgcgcctagacctgctcggttctcttaatcctcctttttaaacctttattgatatggatgtttaaaaagtccggtcgagataaccttcgcatgtcgtcgttgcatcgccagtgcggtactcatgtaggaaagctacactccgtgtcctcctggcaaatgcgcctagacctgctcggttctcttaatcctcctttttaaacctttattgatatggatgtttaaaaagtctggtcgagataaccttttattgatatgaaaaagcaaactaggagcatagcttctagtttgtacttatttaattattgggggatgaaatatgaatgttttagtaattggccgcggtgggcgtgagcatgctttagcttggaagtttgcacaatctgaaaaagtagaaaaggtatatgtagcaccaggtaatgaaggtatgagagatgttgcaacaccagttgatattgatgaaaatgattttgatgcattagttttatttgcaaaagagaataatgttgagttaactttcgttggaccagaaattccgcttatgaatggaattgttgatcgttttaaagaagagggacttcgcgtatttggtccgaataaagcggctgctgttattgaaggtagtaaagcttttacaaaagagcttatgaaaaagtatgatattccaactgcggcgtacgaaacttttacagattatgaagaagcagtacagtacattcaaaaagttggtgcaccaatcgttattaaagctgacggcctagctgctggtaaaggtgtaacggtagcgatgacgcttgaagaggcattacaagctgtgaaagaaatgctgcaagatgtgaaattcggcgcggcaagtaagaaggtcgttattgaagagtttttagatggacaagaattttcattaatggcattcgtgaatggaacaactgtacatccaatgataatcgcccaagatcataaaagagcttttgatggtgataaaggtccaaatacgggcggaatgggtgcatattctccagtaccacaaattccagaaacagcagttcaagaagcgattcaaaccgtattgcatccaactgctaaggcgatgattgaagaaaaccgttcgtttacaggtattttatacgcaggtcttattttaacaaatgatggtccgaaggtaattgaatttaatgcacgcttcggtgatcctgaaacagaagttgtattacctcgattagaaaacgatttagttgatgtatgtaacgctgtattagatgaaagtgaactaacgttacaatggtcagaagaagcggtaatcggtgttgtacttgcttctaaaggatatccagaagcatataaaaaaggtgatattattagcggactagatgcactgcaagatgtgattgttttccatgcaggtacagcaatgaaacatggggactttgtaacgaacggtggccgtgtattatttgttgcttgtaaggcaaatagtttacaagaagcaaaagataaagtatataaagaaatcggtaaaattgagagtgatggtctattttatcgaagtgatataggatatcgtgcaattgggcatgagatgacgaaaagttaatatgtaaaaatcccgctgaggaatcagcgggattttttatgcatcttcatctttttttaatttccctttttgctttgccatttctcgaagtaaatactcgatgtgtgcattgacgctacgaaattcatcatttgcccatttttcgatgactgcgtgtaattcaggatcaatacgtaatggaaagcttttctttttagccataattacttatagcccttagtataggcttcctgtattaataactggctgcgcacctttatctgaaacgatggcaactaataagttgtttaccatatttgctttacgctcgtcatcgagttctagtacgccttcttcatctaacatatggatggaatctttcgccatcttcacagcaccttcaacaatttcttttctagcagctaatactgcttttgcttgctggcgttgtagcattgcatgggcaatttctgttgcgtaagctaagtgcgttaaacgagtttctaatacttctacaccagcaatttcaagacgcgcctctaactcacgttttaattcttcagagatttcttcagtatttccgcgtaacgtaacgcaggtttcatcttggaaattgtcataaggatattttgttgcaacatggcggattgccgtttcgctttgaatttctacaaatcgatcataatgttcaacaccaaacattgcttttgcagaatcaacaactttatatacgataacagctgcaatttcaattggatttccatcaacgtcatttacttttaattttttactgttaaagttttcaacacgtaaagatacagtttgacggaatgcgaaaggaatcgttaaaaataaaccgttttgacgaattgttcctaaataattaccgaagaacgtaataaccttcgcttgattcggttgaacaataccgatacctgtagcgagaactgcggctaatataatagttagtgccgctcctatgaaaatttcttgtgcaaggaaaaatacaccgatagcagctaaaatcaaaattccaataataccgagaaaaccatttacataaaatacttgtttttctttcatatgatcgcctcctgatataaaaatgatatcacttttatatcattttaagcaagaggtatgcatctaattttctgaattttattggttgatatcttttatatacattttaaggttcaaaaagagaatatacgttctgttttatagtaaaataaagaagacttaaccgcccactgcagcagctaagtccctttgagagcatcttgcatcgtgacaaatgattcaaagcggttttgccaggattatatcttcaatcgctgactcaatctctttgtcagaagcgtcataacttccttttgactctggcttgtcatgagtggaagtttgattcacttcttctttagcatgtcctttttcaccaaaattcatgctaggcattttaaatgcccccatattcatgtattttccgaatttccacatttcaacaacagggcagaaacgaacaattccttctgcaactttcattgcaccaatccatagaaaaatgttagaccaagtgcaccacggcttgcgtacaagtttagttgcactacatccgaagaggacgagcccaagtgtaattcgaattagagcgtttattgtcccgatattttgcttcattagaaaaacactcctttttatgaaagttgaaatagataatactatttctcttattagtatcccgtttgatttttgggatatgtaatccaacatttgacgtggaaaaagatgttggattgtgcgtgtgtgtaagtaactttttttgttataatgaaagaatgcataaaaggaacttcaaaattaaatcctctagtttaaaaaatatggaagaggtaattccaaacttaattctccgttttaaacaaatatttaagatgaagttaaaacaataatgatgaaaataaactgttattttgaacagaaatatatataactagagaaaaggaagggtgttttcatgtacgatatttccggatggaaacatgtatttaagcttgatccaaataaggagttaagcgatgaacatttagaaatgatttgtgagtctggaactgatgcggttattgtaggcggaagtgatggagttacaattgataacgtattacacatgctagttagcattcgtagatatgcagttccttgtgtattagaggtttctgatgtagaagcaattacaccaggatttgatttttattacatcccaagtgttttaaatagccgaaaagtagaatgggtaacaggtgttcatcatgaggcattgaaagaatttggggatattatggactgggacgaaatttttatggaagggtattgtgttttaaatccagaagcgaaagtagcccagcttacagaagcgaaatgtgatttaacagaagatgacgttattgcatatgctcgtttagcagacaagctattacgtttaccgatattttatttagaatatagcggtacgtatggagatgttgaacttgttaaaaatgtaaaagcagaattgaaacaagctaagttatattatggcggtggtatttctaatgcagaacaggcgaaagaaatggcacaatatgctgatacagtagttgttggaaatattatttatgatgatataaaatcggcgttaaaaatagttaaagcagtaaaaggagagtaggtgcaggcgtatatgagtatgacagataagttattaaacggtttaaatccacagcaacaaaaagcagtacaaacaacgaatggaccacttctattaatggcaggtgcaggtagtggtaagacacgtgtgttaacacatcgtattgcgtatttacttggtgaaaaaggtgtagcaccatggaatgtactagctattaccttcacaaataaagcagctcgtgaaatgcgtgagcgtattgatacacttgtgggaccagaagcagaagatatttggatttcgacgttccactctatgtgtgtacgtattttacgacgcgatatcgatcgtattggtattaatcgtaactttacaatcttagattcaggtgatcagctaactgtagtcaaaaaaattatgaaagagcgcaatgttgatccgaagaaatttgagccgcgctctattttagcgggtattagtaatgcgaaaaatgaactgttatctgcggataaatatgcaaaaaaaattacaatggctgatccatatgaaaaattaacgagcgatgtatacacagagtatcaaaaacgtcttttgaaaaataattcattagactttgatgatttaattatgacgacgattcagctatttgaacgtgttccagaagtattagagttttatcagcgtaagttccaatatattcatgttgatgagtatcaagatacgaacaaagcgcaatatcttcttgttaaacatttggcagcgcgttttaaaaatctttgtgttgtgggtgactctgaccagtctatttatcgctggcgtggtgcagatatttctaacattttgtcattcgaaaaagactatgagaatgcacaagtaattctgttagaacaaaactatcgttcgtcacaaaatattttaaatgcagcgaatgctgttattgaaaaaaatacgaatcgtaagccgaagaaattatggacagacaatcaagttggaagtaaaatctcgtattatcgtgctgcaactgaaaaggacgaagcgtattttgttgcaaaaaaaattcgtgacgatattcaaatggggaaacgaaaatatactgattttgcagtgctatatcgtacgaatgctcagtctcgtatggtcgaggagattttccttaaatctaacattccgtataaaattgtcgggggtacgaagttctacgatcgtaaagagattaaagatattttggcgtacttacgtttaatcggtaatccagatgatgaaattagttttgcacgtattataaatgtgccaaagcgtggcattggtgcgacttctatcgataaaattattaattacggtgtgcaaaatggaatttcattaactgctgtatttgatgagattgagcatgttggagtaagtgcaaaaattacaaaggcagtaaaagaattcgcgaatttattaaataactgggtaaatatgcaagagtatttatctgttacagaattagtagaagaagttattgaaaaaacaggctatcgcgatatgttgaaaaatgaacgttctttagaagcggaaggtcgtttagaaaacttagacgagttcttatctgttacgcaaacatttgaatctcaaagcgaagataagagccttgttgcattcttaacagatttagcacttgttgctgatattgatcgtgtagatgaagacccaactgctggtgaagaagttattttaatgacgatgcactcggcgaaaggattagagttcccggttgtctttattgttggcttagaggaagggatattccctcatactcgttctcttatggaagaggatgaaatgcaagaagaacgtcgtcttgcttatgtaggtattactcgtgcagaagaagagctatatttatctaacgcgcaaatgcgtacattatttggtagaacaagtatgaacgctgcgtctcgatttattacagaaatcccgacagaactagtggaatcattaaatgaaacagcgccgaagcgtgaaacatcgtttggtacaaaaggcagaacggcaagtagcggcaaaacgacaatcacaacagcaacacgctctcgttcagctttcgcgcgccctgcagctaagacgacaggcggcgaacaaattggctgggcagtaggagataaagcttcccaccaaaaatggggagtcggtacagttgtaagtgtaaaaggtgaaggtgatgcaaaagaattagatattgcgttcccaagcccaattggtgttaaacgtttgttagcaaaatttgcgcctgtgacgaaacaataggaaaggaatgaggatatgtcaaaagagatagtaaaaaaacgtatagaagaattacgtgacttgttaaatacatttaactatcaatatcacgtattagacaatccttctgtttctgatgcggaatatgaccgtaatatgcaggagcttataaaattagaagcagagaacccagagtttatgagtgaagattctccctccgttcgcgttggggggactgttcttgatatatttgaaaaagtaacacataagtcaccaatgttaagtttaggaaatgcatttaacgaaggagatttacgtgatttcgacagaagagtacgtcaaggaattgatggtgcgaatgtaagatatatatgtgaattaaaaattgacgggcttgccgtttcgcttcattatgaaaaaggacgcttcattcaaggggcgacacgtggtgatggtgtaacaggtgaagatattactcaaaatttaaaaacgattaaagctatcccacttcgtttaaatgaagaagtaacgttagaagcaagaggcgaagcttatatgccgaagcgttcattcgttaaactaaatgaagaaaaagagcaaaatggagaagatgtatttgcgaatccgcgtaatgcagcagcaggttcaatacgtcaacttgatccgaaaattgcagcgaagcgtaacttatctatgtttgtgtatggtcttgcgaatgtagaagaaaaaacaatttcatcacatagtgaatcgctggatttcttaggtgaacttggatttaagacaaatccaaatcgccgtacatgtgaaacaattgaagaagttatagcttatgtagaagaatggcaagaaaaacgtccgcatcttgattatgagattgatggaatcgttataaaagtagatgatgttgctcttcaagaaagtctaggaactacagcgaagagtccaaggtgggcgattgcttataaatttccggctgaagaagttgtaacgagattaacaggcattgaattaagtgttggccgaacaggggttgtaacaccgactgcagaactagagccagtgagagttgctggtacgattgttcgtcgtgcttctttacataacgaagatttaattcgtgaaaaagacattcgaattggtgactacgttgttgtgaagaaggctggagatattattcctgaagttgtgaacgttatttttgataagcgtactggtgaggaagaagaataccgcatgccaactcattgtccagcatgtgagagtgaacttgttcgtttagaagaagaagtagcacttcgttgtataaatccaacttgtcctgctcaaattcgagaagggttaatccatttcgtttcaagaaatgcaatgaatattgatggacttggagaacgtgtcattacacaactctttgatgctgattacattcgtacatttgctgatttatatgcattgacgaaagagcaattattacagttagaacgttttggtgaaaaatcagcaacaaacttaatacaagcaattgaaaattctaaagaaaactcgttagagcgattattatttggtcttggaattcgccacgttggagcgaaagcagcacgtacatttgcagagcactttgaaacgatggatgagcttgtaaaagcaacggaagaagaactaaaagcaattaatgaaattggcgaaaaaatggctcaatctgttgtgacatattttgataatgaagatgtattagagttattacagcagtttaaagagtatggcgtgaatatgacatacaaaggtataaaaattgcagatttacaaaatgttgaatcttacttcgcaggaaaaacggttgttttaacaggtaagctagaagttatgggacgaagtgaagcgaagaagaagattgaggcattaggtggaaaagtaacaggaagtgttagtaagagtacggatttagttgttgcaggtgaagcagctggttcgaaattagcacaagcggagaaacataatgttgaggtttggaatgaagagaggttcttacaagagctaaataagtaagaggtgcaaacttaccatgaaaaaaatagcattagcggtattaagccttggcctacttgtaagtgggtgtagtgcaggtgccgacaaagatgaaaaagtggctgggaaatcggggaaagcaaaagaacaatcagttgttccaaaatacgctatttcggatgaatattataagacgactattccatttgatggtggaaaggcacgtggtttagtggtgcaagggttaaatagtcgccttgatatagatgaatttgaaacaggattaatgcgaattgcaaaagaatcatttagtacgaaagataattttttaaaaggcggaaaagctctagatactcaaactatacagatgcttgttaaaagaaaacgtacagatgctgaacaaaaggaactagaggaaaaattaaaaaaagatgcagttaaatttccaaatataggattaaatcctgcgttaggaacaggatccgaatcactagaagtgaaaaataaaaaaaatccaatatatatttcaaatattttagagcatgattattatgtgaaaaaaggcgataacggcgaggaacgtgttggtatggtagttggattagcgatgaattctgttcaatattttaacgaagagcatggttacccacgtgaagctgcaatcccagatgaaaagatgttagctgaagggaaaaaaatggcgcaagaaattttgaaagtcatacatcaaaaagaacctgaaacaaaaaatattccgataacatttgcgatttatcgccaagctccaaagtcttcgctcgtgccaggtaattttgtttcttatgcaaatgtcgaaaaaggtagtgaaacggttgaagattggaaacaaattaatgaaaaatattatttgttcccatcagagcaagcgaaaacagataataaacgtgaagatcttgcaagagtatccaactttaaggcaaaactaagcgattatttccaaggcgactatacagctgttattggtactggtatgtatagagatgatgaattaagagaaatgaagcttgatattcctgtccagtttaatggaaaagcggaaatagttggttttacacaatatgtggcagggcttgttatggaatacttcccgaattatatgaaagtacaagtaacgattaaatctgtagaacgcccagaagctattattatacgtgaagcaaaacaagatgaaccacttgtgaaaattttagattaaatatgaaggctgttcctctatggaacagctttttttcttatgtaattttgttataatttaaaatgttgtaaaaaataggggtgaggggtaaagctcatggaagaattaagttttcaagtcattattttattaattgcattcggttttttagcagcttttattgattccgttgttggaggaggagggttaatttcgcttcctgcacttatgtttgttggcctatcgccagcttcggcaattgcaacgaataaattagcggcaacaatggggacgtttacgagtgcgatgtatttcattcgatcaggaaaagttgattttaaaattgtaggaaagttaatcccgttaactattgttggagctgttgcaggtgctttagtagtaaaatttattccatcggatattttacgcccattagtacttgtaatgttggtatttattgctatttatattattgcaaaaaagaattggggaagtgtgtctacctataagaagatgacgcaaagaaaaacattaatatttttctttgctattttaatgataggattttatgatgggttttttggaccagggacagggtcgtttttaatttttgcatttttattaattggcttggattttattcaagcggcagcatctggaaaacttttgaactttgttagtaatattgtatctttaattacttttttattcttagacataattcattttgaatacggtattatcatgggattatcaatgatcttaggtgcttattttggatcgaagtttgcggttcaaaaaggtgttggatatgtaaggactttatttttattagttactatattattgatcgggaaaaatgttttggaatatactcatattttgtagattcatacgcatgtatgaatctcttttttttattatattttaaaaatttattaatttttaaaatataagtctaggaatatttgaataaatctaaattatcgtgtagaataatgttgtaaaatgtaaacgtttttctaaggggaggctaaaaaaaatggtagtagcatacaaacatgagccatttacagatttttcagtggaggctaacaaattagcgtttgaagaaggtttaaagaaagtagaatcttatcttggacaagactatccattaattattgggggagaaaaaatcactacagaagacaaaattgtttctgtaaaccctgcaaataaagaagaacttgttggtcgtgtttcaaaagcaagccgtgagttagctgaaaaagcaatgcaagtagcggatgaaacattccaaacttggagaaaatcaaagccagaaatgcgtgcagacattttattccgtgctgcagcaatcgttcgtcgcagaaaacatgaattctctgctattcttgtaaaagaagcaggtaagccatggaatgaggcagatgctgatacagcagaagcaatcgactttatggaatattatggtcgtcaaatgttaaaattaaaagacggtattccagtagaaagccgtccaattgaatataatcgtttctcttacattccattaggagtaggtgttatcatttctccttggaacttcccattcgcaattatggcaggtatgacaacagctgctttagtttctggtaacacagtattactaaaaccagctagtacaactcctgtagtagcggcgaaatttatggaagtattagaagaagctggcttaccagctggtgtagtaaacttcgttccaggtaacggttctgaagttggtgactacttagtagatcatcctcgtacacgtttcgtaagcttcacgggatctcgtgatgtaggtatccgcatctatgagcgtgcagcgaaagtaaacccaggacaaatttggttaaaacgcgttatcgctgaaatgggcggtaaagacacaatcgttgttgataaagaagcagatcttgaattagcagctaagtctatcgttgcatcagcattcggattctcaggacaaaaatgttctgcatgttctcgtgcagtaatccatgaagatgtatacgatcacgtattaaatcgtgctgttgaattaacaaaagaattaacagttgctaacccagcagtattaggtacaaacatgggtcctgttaatgaccaagctgcatttgataaagtaatgagctatgttgcaattggtaaagaagaaggtagaatcttagcaggtggcgaaggagacgattctaaaggctggttcatccaaccaacaatcgttgctgacgttgcagaagatgctcgcttaatgaaagaagaaatcttcggaccggtagtagcattctgtaaagcgaaagacttcgatcatgcacttgcaattgcaaacaatacggaatacggtttaacaggtgctgttattactaacaaccgtgaccatattgaaaaagcacgcgaagacttccacgttggtaacttatacttcaaccgtggatgtactggtgcaatcgtaggttaccaaccattcggtggctttaacatgtctggtacagactctaaagctggtggacctgattacttagcacttcacatgcaagcaaaaactacttctgaaactttataagaaatagtagaggagctcttcacagaatgtgaagagctccttttaaaattgaaaccccatatattaccgtcgttcgaagagaatgagctaaaacctattaatagcgtgataaacatgtgaacagaaataaaatgatgagaaaagttgacttattagtcatattttttagtattcattttgagaatttcctgtataatacaatttgaaagaaaatctatggttcgacaaggaacactcctttcagttttgctcactgaaaggagtgtttttttatgtagctaaaaattcttgcgtgcttattacatttgcatatacgccatttaaactagctaaaattgtattgtgaatataaacagctggtatagtagcgttcttaaaagaaaggtcttttgtagcacaagcgtcatgtataacggtacattgaaagccaaaatcgaatgtagcccttactgttgcatcgatacacatatgagtcatcatcccgcatacaacgacatgttcaatatttaaacgttttaattgctctagaagattagtttctcggaagctatttggataatgtttgactataactgtttcttctctaagtggacgtacgctttcatgaatatgtacaccttctgtattaggtaggaaaaaagtagcgtcatcttttatagctacgtgttggatatgaaaaataggttcgctgtttgttctaaattgttgtaataactgattagcatattcgcttgcttctactggattacgcaattccatctttccatttggaaaataatcgttttgaatatcgacgagtaaaagagctgttttcatatatttatcttcctccgagtttcatattcaaataaatttattcaattcgtagagaggattctcctgtttaaaaatatgaggaagaagaattttaaataaccttgaaagttactaattttcagatgaatattcatctgaaaattttaataaaggaataattaatatttttctaaaaaatgtattgactcttattattctgagttctataatgagaattaattaaacgacaattaaatcgatacattcttatccagagaggtggagggactggccctacgatacctcagcaacgggtttttttaataccgtgctaactccagcaagccatataaaggcttggaagatgagaagatgtgaacgagtacatataagtgctctccttcttatctttatggttgataagaaggagggcactttttattttacctcgaaagctctgcttcaagtttttacagcatataggagggaaaaaaatgatttcttttaccaatgtaagtaaagtgtatgaatcagctggccaatctgttcatgcggtggaggatgtaacattatcagttgagaaaggcgaaatttttggcattatcggttttagtggcgctggaaagagtacgttattacgcttagtaaatatgttagagagaccgacggcaggaacgatttcaatagatgataaagatattacatcattatcgacgaaagaattgcgtaaactaagacaaagaatcggaatgatttttcaaagttttaatttatttaattcaagaacagtatttggaaatattgcttatccattaaagttagcgaaagtaccaaagaatgagataaaagaaagagtaaatgaactgctgaagtttgtagggttagaagataaagcaaactattatccagagcagctatcaggtgggcaaaagcagcgtgtgggcattgctagagcacttgcgacatcgccagatattcttatatgtgatgaggcaacatcagccttagatccagaaacgacgacagaaattctaaacttattaaagaaagtaaatcgagaatacaatttaacaattcttcttattacacatgaaatgcatgttgtgaaagaaatttgtcaccgtgtagctgtaatggagaaggggaaagttattgaagaaggaaaactgtttgatgttttcacgcaaccaaaaacaaagacgactcaaaactttgtacgttctgtcattaatgatcatttaccggaaagtgttctagcgaaaattcaaaatggtggtcaaatttatcgtctaacatttactggtgaggagacaggacagccggtactatcatatatcgcaaaaaactataacgtcgatgtaaatgtactgtacggaaatattattgaacttcaaaatgtgctatttggaaatcttcttgtagagttgcaaggtgagcagagggaaattcaaaaagcattacaacatctaagactgcaagtgcagctgaaggaggtagaagctcatgcgagttgattggagtatattttggccgcgcatactagatgcgacgggggataccctcttaatggtaattgtaacccttatattcgctacaattctgggtatacctctaggtttacttttatatgtaacgagaaaaggaaactttttagaaaataaatgggtcttttctattcttaacatcataattaatacaattcgtccggtaccattcattatctttttagtagccttaagtccactaacaagaagtgttatcggaacgacgattggaacagcagcggcaattttcccgatgacgttagtcgcatcaattggtattgctagaatggttgaaacaaaccttgtttccgttccgaaaggagtaattgaagcagcgcaagcaatgggcgcctcaccaattagaattgtttttgaaatccttgtaccagaagcgttagcaccattaatcttaggtgtcacatttatgacagttggtttaattgaattctctgcagttgctgggcttgtcggtggtggcggtcttggtgacttggcaatgacatatggttatcaacgttttgatacatcagttatgttcgtaacggtcgtgttacttatcattctcgtacagatagctcaaaatttaggaaactactttgcgaaagtcttgttacgcagatcataaaaaggaagagaggaaaagaaaatgaagaaaattttagcatttgcattatcagcgattgtaggagtctcagcattaagcggctgctcaagtggagacacgggtgcaggagcgaaagaaaaagtagttcgcgtcggtgtaactggaacggatggagacgcttgggaaattttgaagaaaaaagctgaaaaagaagggattaagattaaactggtcgagttctctgattacacaacgccaaataaagcgttagctgatggagatattgaattaaactcattccagcatattgctttcttagagcaatttaaaaaagagcataagttagatattacagctgttggtacaacgcaaattgcgccaatgggtttatactctgaaaaatataagaaagcaaatgaaatcccagatggttcagaaattgcaattccaaacgatccaacgaaccaagcacgggcattaaaacttcttgatgcagctggattattaaagcttaaaaaagactttggtctatttggagatccaagtggtattgctgaaaatccgaagaaattaaaaattacaccggttatcgcacagcaaacacctcgtgtgttaaaagatgtagcggcatcagttattaataacggtgttgctggtcaagctggattagatccagcgaaggatcctattttcttagaagatccaaagaatgaaaatgcaaagccatatattaatatttttgcagctcgtaagaaagataaagatgatccaacattgaaaaaagtaattgaactatatcattcaaaagaagtaacagacgcaattaagaaagaaacaaatgatggttccatttcagtagatctttcacttgatgagcttgaaaaaatcgtaaaataatcattgggtttaatggactaacagaaggaacccctccgctgttagttcgttcaacatataaacttaacaaacaaaccctaattctgtaccttccaattttgtataacatagaatccaatgtttgttaagtagagtgatagaccaggaattttcctggtctttttttatgaatgaaagtagctagcgaacagtaaggtgatccaaattataatgggataagaaaataagctgaaaaggagtgtaattacgaattgctttggatgaattaagtgtttttttgataaaaaaaagaaaatagaaaagagagtaatgaaaaatgctgatattacgccggggttataagagcgataaatgaaaaacaaaataatatgttgaacagagttgaagaagatggccccttgtataaaaataatccagcatatagaagacaagaagttaagttgatatagaaagacgataagtaatacaaagattgttaatacggaaatggcgatgaaaaattgttggctagttataagacggattgaaaattgattagcaaggtattgtggcatttggaaagcttcttcaaggttatgaatgaaaaataataagggaatgatccagaatatagtagtggaatgttttttcatcaatttacatcactccaataaagtatagaaagcctaaaaaaaggccctctatacagagatggttattcaattatgatattttttaaattaacttcatgatgctctcgttctttcagataagcagctagttcctcttgtaaaatatttaatatttgcttagctgattgttggattggattaggtagctcttctaatatatgcatcccgacttttacttttgtacgaattacccttcgtagtaattcctcatgcatgtactacacctccaaaccgaatatttagtacatcttcttcaaattttgctccttgaatagaaaggtgtgttaatgtttttggtaacgtgatgttccgtttaacagaacccgctcgaataataagttcatcacctttttgatttaaggaaagttcacttttgtttgagaagggaatggacagaacgaaaatatactcatcgccatccttttttacatattgagtgcgcccgttaaattttacttctgtaggggaatgatcagttttaaataaagaatctcctacacgttctaacatagacaaaccaacaacttcttgttcaaacattggagcttcgtaaataggaaggggttgaaaactatctttaattaatgttttatatttcttctgtgtatctttccatgcctgaaaataaggatcggtgacagtgttagggatgacgcggttaatcataatggcatctacgttataatcgtataaattcaaataagtaaagctgcgctgggcttctttaatgaccattttttcaggatttacaacgatgcggatacttgttacttctcgatttgataaaatatctctcatttctccgagctgttcaagtgtacttgttaattcgtccataatatcgtcggttggaagagggacaccaaggagtggttgagctacaggacgaacgacttttaaaacttttcttttaataggaaataatttttccatccaccagccgagcatgtctggaaagcttagcattgctaatgtttctcctgtaggggcacaatcaataatgataacatcatatgtgtcttgcttataataatcgagtacgcgaagtaggctaattaaatcttccataccgggaaacatcgttaattcttctgttgtaatatcatcagctgctttagaagtgaagagtagtgtaatatatttctgtaattttccccagcctttttccatttcataaatcgtattaatttcttgtgcccacaaattttcacgaatttctagtggttcagaagatagctttataccaaatgaatctcctaaactatgagcaggatctgtgctcattactaatgtttttaatccttgtttcgcactttgaattgctgttgctgctgaaatgctagtttttcctacgccgcctttacctgtatacaagataattctcatcattcatatcccctttgtttcgaatgtcgaatattacgagtgtcgaagtaaatggttgaataaaaacccagatagggttttattcaatcggaatgtttttcattttaggtgtagaaatcttttcttctgttttttgctgtgacgtagcgatgtgattcatgattttttggaagatttgtagtaagaatgctttttcttcttctgataatgcttctgttactaagctaaagtaatgggccgcattttgttttacttcttgaacgagcattacgccgttttctgttaaccgaattaatacaatacgtcggtcattttcatcacggtagcgttcaatatatcccttttttacaaggcgatttacaacgcccgttgttgtactcatcggtatatcaagaagatcagcaattttcgtcattgtaatatctgtatttcgttccatccaaagtaaacaaaatacttctgttttagaaagtgttaaatctaggcttacccattcttcaggatagaaaagtttcttggcgttatctagcagtaagtctaaaaaatgttcatattgcaacaattaattccactcccgtatatttcgaggttcgtaatatttatttttattttatgtagaatagaaataattgtcaatgattttaattgttttttcagattaggcagaaaactttctttaaaatagtattcttttatgatagatttataaatataaaacgagaatttacataaaaatccatcatggtaaatatacttatctataatgggtatgcagctaacgagggggagaacgatgagaagacgtaatacgcaagcgttcacgtttttagcatggacttcatttgtttgtgcgatttcaggtatgctaattgggatttatacgttagatgaaacgcttagtgtaaaaggatactatttaattggaacattatttttaacgatgtcttgttttgtattacaaaaaacaattcgtgataatgaagaagataacgagagatttccgaaaaataaaccgttagataaagagtaaattgtaaagaaaggcatttgcctttctttttttatgtaaaaatggcgtaagtactctgtgttgacttgcttgaagtactgaaaatttggtatcatcaatagtattgtagattgaacgatatattatggaggtggcctagccgtgtcaagaatttccgttgagaatgtaaagcacgtagcacatttagcacgtcttgcaattactgatcaagaagcagaaaaatttcaaaaacaactagatgcaattgttacatttgcagaacagttaaatgaattagatacaacagatgtaaaaccaacaactcatgtattaactatgaaaaatgttatgcgtgaagatgtaccagaaaaaggtttaccagtcgaagaagtattaaaaaatgcaccggatcacaaagataatcaaatccgtgttccagcagtattagaatagaggaggggaatttcgatgtcattatttgatcattcagtatcagagttacataagaagttaaacaacaaagaaatttccgttacggatttagtagaagaatcttacaaacgtattgcggatgttgaagataacgtaaaagcttttcttacattagatgaagaaaatgcacgcgcaaaagcgaaagaattagatgcaaaaatcggcgctgaagataatggtttattattcggtatgccaattggtgtaaaagataacattgtaactaacggtcttcgtacaacttgtgcgagcaaaatgttagcaaacttcgatccaatttatgatgcgacagttgtgcaaaagctaaaagctgctgacacaattacaatcggtaaattaaacatggacgagttcgcaatgggttcttcaaatgaaaactcaggattctacgctacgaaaaacccatggaacttagattacgttccgggcggatctagtggtggttctgcagcagctgtagcagcaggagaagtactattctctctaggttctgatacgggtggttctatccgtcagccagctgcatattgcggtgttgtaggtttaaaaccaacttatggacgcgtatctcgttacggattagtagcattcgcatcttcacttgaccaaatcggaccgattacacgtacagtagaagacaatgcatacttattacaagctatttcaggtattgaccgcatggatgcaacttctgcaaacgttgaagttggaaactatttagctggtttaacaggcgatgttaaaggtttacgcattgctgtaccgaaagaatacttaggcgaaggtgttggcgaagaagctcgtgagtcagtactagctgctttaaaagtattagaaggtatgggcgcaacttgggaggaagtatcgcttccacactctaaatacgctctagcaacgtattacttactatcttcttctgaagcatctgcgaacctttcacgctttgatggcgtgcgttacggtgttcgttctgataatgtaaataacttattagatctttacaaaaacacacgtagtgaaggtttcggtgatgaagttaaacgtcgtattatgcttggtacatttgcgcttagctctggttactatgatgcatattacaagaaagcacaacaagtacgtacattaattaaaaacgactttgaaaatgtatttgctaactatgatgttattattggaccaacaacgccaactccggcatttaaagtgggcgaaaaagttgatgatccaatgacaatgtatgcaaatgacattttaacaatcccagtaaacttagcgggtgttccagcgatttctgttccatgtggattcggtgctaacaacatgccacttggtctacaaatcattggtaaacacttcgatgaagcgacaatttaccgcgttgcacatgcgtttgagcaagcaacagactatcatacaaaaaaagcaagtctgtaaggaggcgagcatagatgaatttagaaacaattattggtttagaggttcacgttgagttaaaaacaaattcgaaaattttctctgcgagtccaacagaattcggagcggagccaaatacacaaacaagtgtaattgacttaggatacccaggggtacttcctactttaaataaagaagcagttaactttgcaatgaaagctgcaatggcattaaactgtgaaatcgcaacggaaacgaagtttgaccgtaaaaactatttctatccagataacccgaaagcttaccaaatctctcaatttgataagccaattggtgaaaatggttggattgaaatcgaagtagacggtaaaaagaaacgtatcggtattacacgtcttcatttagaagaagatgctggtaaatcaacgcatacagctgatggttcattagtagactacaaccgtcaaggtatgcctttaatcgagatcgtatctgagccagatatgcgtacgccagaagaagcatatgcatacttagagaagttaaaatcaatcattcaatacactggtgtatctgattgtaagatggaagaaggttccttacgttgtgatgcgaacatttcccttcgtccagttggacaagagaagttcggtacaaaagcggaactgaaaaacttaaactcattcacttacgtacaaaaaggtcttgagcatgagcaagtgcgccaagaaaaagaactgttatctggtggcatcatccaacaagaaacacgtcgttatgatgaagcaacaaagaaaacaatcttaatgcgtgtgaaagaaggatctgacgattaccgttacttcccggagccagacttagttgaactttacatcgatgatgagtggaaagaagcagttcgagcttctattccagaacttccagatgcacgtaaagctcgctacgttgcagaattaggcttaccagcttatgatgcacacgtgttaacattaacgaaagagatgtctgatttctttgaagcaactgttgcagacggtgctgatgcgaaattaacatcgaactggttaatgggtgaagtacttgcatacttaaacaaacaacaaaaagaattaaaagacgttgcattaacgcctgctggtttatctaaaatggttcaattaattgaaaaaggtacaatttcttctaaaatcgcgaagaaagtatttaacgaattaattgaaaaaggtggagacccagaagaaatcgttaaagcgaaaggtcttgttcaaatttctgacgagggtacacttcgtaaagttgtaacagaaattcttgataataatgagcaatctatcgaagactttaaaaacggtaaagaccgtgcaattggcttcttagttggtcaaattatgaaagctacaaaaggacaagcaaatccaccacttgttaacaaaatcttacttgaagagattaataagcgataatagtagtgacttttaaagattaagcagaaaaacacccgtacatgggtgtttttctaggttaatcaaacgtttgtttaaatgagacaaaatcgtttaaacaaacgtttgattaactgtcaaaagtggaaaaatgtttgtatagcaactatggtatgatagttgcaaaaaggtgggaataatgataaatctaaacatagaggtttttttcatctcatgaaataatagatagttattattcgttatatgtaaatttttatggaagaatggatagaaataaagtgaaactttaatcagtaggaggttcatccaccattgattattagccctcaccaatcgggcatttactgcccgcaaatagcgggataaattttgaagtcaaataaaaaaccattgaaatgaatatttacttttgatggactacacgaatcgggttcttactgcctgtttgagcgggataaaagaaggatagcaagatgagaggaggtaggcatgggaatactgaatagaagttcagtatgttctttttcgatacataaagaaatttcctgtgctaataaatgatgaagcgagcaagaattatttataatcctacttcggggcgtgagctatttaagaagagcttaccagaagtattacaaaaattagaacaagctggctatgagacatcttgtcatgcgacaacgggtcctggagacgctactgtggcggcgaggcaagctgcggatcgtaagtttgatgttgttattgcggctggtggcgacggtacattaaatgaagtagtaaacggtttagttgggcatgaattccgtccgaaatttggaattattccagttggaacgacaaatgactttgcacgtgcaattggtgtacctcgttctattgaagaggcagcagatattatttgcgaaggaaaaacagtgccattagaccttggtagagcgaacgatacatattttattaacatcgctggtggcggtcgtattacagaattaacatacgaagtaccgagtaagttaaagacagtattaggacaacttgcttattacctaaaaggtatcgagatgttaccatcattgcatccgacatatgttgaaattgagtatgatggaaagttactacaagaagaaattacgatgtttttaattacgaatacccgttcagtaggtggatttgaaaaggtagcaccgtatgcatctattaacgatgggttatttgacctattagtactgaaaaaaggttctatcgctgatttaattaaagcagcaacacaagcacaacgtggtgaacatattaataatccaaaagtgttatatacacaagcgaaccgaattaaagtacattcaccagataaactaatgattaatttagatggtgagtatggtggagatgcaccgatggaattcgaaaatatatatcattgtttagaactatttgttcctgaacatcaagaggatgccctgtaaaggcatcctttttactttgttaaaatgaattgtaaattgggagttagtttgatttttatggtatttttacaattcttttattttacatccatactttattgatacactggaagagataagaaatgagaggtagggtgctatggagaaggtaaaggcgatattatttgataaagatgggacattaatggattttcattcaatatggataaaagtagctgaagaacttgtagctgaatgtataagtttatatcatttaccaagtacaatgcggcagaccttattagaagagattggtgtagagggagcatttgttaatccgaggagtgcaatagctgctggaacaagccttgatgtagcgaaggggctttgtaattatattgagtctgctagagaagaagagatgcatcattgggtaagtgagaagttattttcccttatgtatgagcatcgttcgcatatgaaaatgacagcagatttaccgaaagtgttacaggcattaaaagataaaggatttatattaggggttgtcacggcggatgatttcgcaccaacagaattatttttaaaacaatataagttggagaacttttttgattatattatagcctcggatacattccctgcgcaaaaaccagataaaaagattatagaagtgttttgtgaaaaatttaatttagcatcatgtgaggttgcggttgttggagatacgccaactgatttacatttagccaaaaatggcgattgctatgcaattggggtgctatctggtacgggagaccgtccaacattagaaccacttgctgatttagtgttagattctgttggagagtttatttctcaatcgggtgagtttttctgggagaaagaaaagtctaatgtgtaaggaaaataagtctataaagactcttaatgagtctttatagacttattttttatgcctggatacaaagaatataggataaatgctagaaaagaaagttggcatacattttgcaataaaaagagaaaacaatgtaaagaaaaggatggggtacgcaatgaacacaaaaaaatttgctaaagtaaatgaacaaattccaggaccgaaagcggcatctttattagaacgccgtcaaaatatagtaccaaaaggagtaagtaacggcatcccaacgtttgtacaatctgcaaatggtgctcttgtaacagatgttgatggtaatcagtacattgattttgcaggagcaatcgggacaattaacgtagggcattgtcatccagcggttaaagaagcgctccataaacaagtcgatcaatacattcatactggatttaatgtcatgatgtatgagccatatattgaattagcggaaaagcttgcggcattggcaccaggaagtttcgataagcaagtcctctttttaaatagtggtgcagaagcagttgagaacgcggtgaagatcgctcgtaaatatacgaagagacctggtattatcgcattttctaaaggtttccacgggcgtacattaatgacaatgacgatgacaagtaaagtgaagccatataaatttgggtttggtccctttgctccagaagtatataaagcgccatttccatacgaataccgtcgcccagagggattaacggaagagcaatatgatgattttattattgaagagtttaagaacttcttcatatcggaagtagcaccagaaacaattgcagctgttgtaatggagcctgttcaaggggaaggtggatttatcgtcccaagtaagaaatttgttcaagaagtacgccgcatttgttcagagaacggcatcttatttgtagcggatgaaatacaaacaggctttagtcgtacaggaaaatattttgcaattgatcactataatgtcgttccagatttaattacagtgtctaaatcattaggtgctggtgtaccgataagtggtgtcattggacgtaaagaaattatgaatgagtctgcaccaggtgaacttggtggaacgtatgcaggaagtccattaggatgtgcggctgcattagctgttctcgatgtaatagaaaatgagaaattaaatgatagagcgatagaattaggaaaagtcgtaatgaaccgattcgaagagatgaaaaataaatatcattgcatcggcgatgtgcgtgggttaggtgcaatgtgtgcatttgaggtcgttcaagatcgtaagacgaaagcacctgacaaaacgttaacggctaatctatgtgcagaggcaaataagcgtgggttactgttattatcagcaggaacatatggaaatgttatccgtgtgttaatgcctttagttattacagatgagcaacttgaagaaggtttaacaataattgaagaatcattgcaagcttgttatgagcaaacaaacatcgctcgcgtttaaaaaatgaagtataaatagcaaacattctagctgactctatattaaatgcagaaaattcactttataataaaggtagtgaagtggatcgatggatttgaagttaggggtggctaggatggttgcagaaaaggaacgagtgttaatggatttaaaagatgtatttgaatatgcgtttgacgaaatttttgttacagatgagcaagggatcgttgtgcgtgtaaatagtacatgtgaaaggcactaccaactagctgccgaagagttagttggtaagcatgtaaaagaactacaaaaggatggaatcttttatccatcagcgacattagaagtgattgaaaaaaagaggccaattgaactcgttcaaactacaaaatcaggagagtatttacacgttcgtacaaggcctgtttttgatgatgagggaaatttaagaagagtgattagttattctcgggaccttactgaactctatcaattacgtcaaaaggtagaggaaatggataatcagctaaaaacatataaaaaagaattaagagaaacatatgagcatgaaggacttatttttaaaagtctagctatgcaaaaaatagtcgatacaatcaaaaaagtatctgtagtggatagtactgttctcgttttaggcgagactggagttgggaaaagtcgattagtacgccatttacatgaagtgagtcaccgtaagaatgaaagtttctatgaaattaattgtgcggcattgccaactaatttaattgaatcagagctttttggatattcaggtggatcttttacaggtgcgaatcgtgaagggaaaaagggactattagaatccgcgcataaaggaactctttttttagatgaaatcggtgaaatgccgcttgaaattcaagcgaagcttttgcaagtattgcaagaaaaaacatttcgtcctataggcggaagagaattaaaaaaagtggatgtccgaattgtggcggcaacaaatagagatttaagcgagatggtgaaacaaggaacatttcggaaagatttatactatcgtttgaatgtcattccaattgcaattcccccgcttagggaaagaacagaagatattttgccgcttatttatcattacttgcagcattttaataaaaaatacggacgtgatgtgaaactagcgccgagtacgttacaaatgtttgttggatatccgtgggaaggaaacaatagagaaatagagaatgtaattgagagaattgttattactgtcgatgatgttgtaacggtagaggatttgccactctctatgcaagaggctgcagttgaacaatcggggcaaagcctttataaaatgctggaagaggtagagagaaatattattcttaaagcgtataaaacgtatggatcaagttataaagtagctgagtttttgcaaattagtcaatctgctgctactaggaaaattaagaagttcatagaggaggaagaaaacattggataaaaaggcgactttcgtaagtatagataaaaaggcgatgtatataaatggtgagtggattacactacaagaacaaattgaagtaaataatcctgcgacgaaggaaatatttgcaactgtaccaaagggcggagtaacagaggcaaagcaagctgttgatgctgcacatgaagcttttaaaacgtggtctaagttaacggcagcagatcgtgccacgaagttaaaaaagtggttcatgcttattgataaaaataaagaagaaatcgcagcgattatgacgaaggaacaaggaaagccgtttgcagaagcgcttggtgaagtaaattatgcaaatagttttgttgaatggtatgcagaagaggggaaacgtgtatatggtgaaatgattcctgcttctcatccgaataagcgcattttagttatgaagcaaccagttggcgttatggcagctattacaccttggaacttcccggcagcgatgattacgagaaaggtagcaccagcgcttgcagcaggctgtacagccgttgtgaaaccggcgagtcaaacgccattaactgcattgaaattagctgaattagctcatgaagcagatattccaaagggcgtaatcaatatcgtaacaggtagtgcaaaagcaattgctgatacatggatggaagatagtcgcgttcgaaaagtgtcctttacagggtcaacggaaatcgggaaagagttaatggctagtgctgcacaaacgatgaaaaaagtttcgcttgagttaggtggccacgctccatttatcgtaatgaatgatgcagatttagataaagcagtagaagcggtaattggttcgaaattccgtaacgcaggacaaacgtgtatatgtacaaaccgagtattcgttcaagaagaagtatacgaagtatttgtagagaagttccaaaaggcagtagggcagttgaaagtaggagacggtttcggtgacggaacgactgttgggccacttattgatgagaatgcagtttcaaaagtacaagaacatattgaagatgctattcaaaaaggtggaacagttttatatggtggtcaaaaggtcgcagagttagagggacatttcattcaaccgactgtaattggggtggcaaatgatacgatgctttgtatgaatgaagaaacatttgggccagtggcaccagttgcgaaattcaaaacagttgatgaagtaatcgaacgtgcaaataatacaccatacggtttagctgcgtatattttcacgaaagacattagccaagcattccaaattagtgaagcgttagagtacggtattatcggtctaaacgacggtcttccatcagttgcacaagcaccattcggtggatttaaagaaagtggtatcggccgtgaaggaggccatttcggcatcgaggaatatttagaaattaaatatatttcattgggactataagtagtatactagaatctctataaggtaacagagaaggagattctagtatggtatattggctattattacttgttacaattatttttgaagtagctggaacaattgcgatgaaactatcaaatggtttaacaaagctcgttccaagtgtactgattttcgtgttttatggaatttgtttcagcgtgttcgccatcgttgtgaaaaagatccatttaagtattgcttatgctatttggtctggcgttggaacattacttattacaatcattagtgtgtacttttttaaagagcatattagtttatttcaagcattttgtattctttttattgttttgggtgtcattgggcttaaggtttcatcggcatcatgaaagctatcttttgtagaagatagcttttttctatttgtgcagttagcaattaatacgacaaaatatgacaagaaagcgtaaagcattttgttatgatacatatgaaatattgtcttatgtggaggaaagagtatgttaaaaaggtgagtcaaattgttttaatttttggcatagcttttagtttaagtgcttgcactgagactaaagatagtaatgaaagtaaacaagaagatgttcaagataaagtgtataaaataggggagacagtagacgtagatggtttgcaagtaactatcgattcagttaaattaggatatacggattatgatgaggataaaaagaaagaggagattttggggattattttcaaagtagaaaataatagtaaaaaggaaataccttttgcattttatgaatttgagattaccgataagaaaggtacaagatttaaagaatataataaccctgatagctttattagtaaaaagttagcaccagaagaaaaaattcaagatatcatgctatttgacgtagcgaaagaaaatacgtatatcgctacgtatagaccagagtttacgcgtgaaaatagaacaataaaatttgaattgaaaccaaataaataaagaaacacattggattatccaatgtgtttctttatggtaataaatttaaaacgcccagttacctttacggaagataggctcatgtctgccatcagcagtaataccgtcaatatcaagctcagctgatccaatcatgaagtcgttgtgtgtaatactagcgtttgcgccgttttcagcaagttcttctttagacattgtttttccgccaactaagttaaatgcgtaagcatttccaatcgcaaggtggcaagatgcattttcgtcaaatagtgtattgtagaataaaacatttgtgtttgaaattggtgagtcatgaggtactaaagctacttcccctaagaagtgagaaccttcatctgtttctactaaatgttttaaagcttcttcaccagcttcagctttatagtctacgatacgtccgttttcaaatgttaacgtgaaattatcgataatattacctgcaaatactaacggttttgtactagaaacttggccgtttacacctgttttaagtggcattgtaaatacttcttcagttggaatattagccataaatggtacgttcttttcatttaagctaccagcaccagcccatacatgtttttctggaagttcgattgttaaatctgttccaggacctgtatagtgaagagctttataatgcttttcgtttaagtaatccacttttgtatgtaatgtttcatcatgttctttccatgcttctacaggattttctaaatcagcacgagtagctttgaaaatagcatcccataacttggcttcttgttcttctggcgctacgtcagggaatactttcgcagcccattctttcgtaggaacagaaatgacacaccagcttactttatctgcttgtacgtaatcacggtatactttcattgcttctccagctactttatgagctgttgcgatacgcgatggttctacaccttttaataaatcagggttttctgcatagatagacataaatgcagcgccttcttttgctaattcttcacgagcatgtgctttccaagatggaaattcagcgaaagcttcttcaggagctagatcgaattttaagcgtgttaacgtctcatcattccaatctacatatacgtgttttgcaccagatttatatgctttttctgtaacgaggcgtacaaattgtacagcttcaagaggtgcactaattgataaagtttgtccaggttgaatattaacaccaacattaactgcaagagcagcatatttctctaacgtttgttcaaatgacatatgtataatctcctttaatttgaaagatttcttactatatataatacaagaaaattctaaaaatatatataaatataaagtaaaaagagagctcaaaatgtgttgagcccttatatttacttaattgaagaagcaaactgctctacagtcgttgtatggtgtatacgaacgcgcttcatctttaacaattcatcaggttcacccttcgtaatgaattgcccaggctttgtcgtcgtcgcaaattgataatacttcttcgtttctgcaacaaccttatcatctacatgaccgaatggataagcaatcgcgataacaggcttacctgttattttttctagcttttcttttgaaccttttaactcttcctcatagtttgtaattttcggtaaatctgcatgtgttgcagtatgagattgcaccgagaaaatgccggaatcaaccatttcttttatttcagaagtagacaatgctccttctacatcaacgttatcaacaatcatatattctgttgctgccggtttaaaagtatcatcttttagcttttgtaaaatgcgaaatgcattcatattatttttcataccgtcatcaaatgtaacgaaaatcggtttatttactttatttatatcgccccagcgttcaaacgttaaaagcgtataaccattgtcctttaaatgtttcatttgtgcttcaaagttagctggtgatacgaataagtctttaatgccttgaccatgataatcatcaattgcgtgatacataagaacaggaaccttttgttcgaaagtaatagtagatttcgtaagcgggattgttttcccatcttctttcattcctgttgcttcaatttggaactcaccgcgttttccttcaaattcctttatatcaaaaggaagtgtgaattgtttctctttttctttagaagaaaaagatttagcactttccttgccatcagctgtgcgccaaattttatattgtacttcatttaaagaatcttttatgtctgtaatatgaatacttgtgtttgtagattcgtgtgtaactgaattatatgagattttaccttgttcttgcacagtctcttcttgtttcttaatcccttgagccgttttctcttttttaggttctggacttacattgttagtattacagcctgctagaatggcagacgtacataaagcaattgctgcgtattttctcataaaaatcaccttctattgtgtagtatgttgcatatttatattaaaatccccaccgctataagagtggtggggatatacccttgttcatcatatcatttgaagaaaatgaggggaatatgatttttaggaggttattaatgtaatagattagtgactttgaatagatgtgtttttttgtttcttattagaattaataataatataaccgactacaaagataagaggaataatgaagacatagataggcattccccatacataatagcttttcagggttaagactagtaaatgtaagaaatcgaaaagggcgtgaattttcataaggtcctccaatgttttttacaaattataacatttaatgcttgttatttgtataatttggaaagtaatttaagctaattttaaagtaagaagaagacttattaatatgcaattttgcataaggatatgtattttattaaaatataaagattttatactataatgaaaaccgctataaaactaagtaagaataatgtatggagtggagaatagaaatgaaatataaaaaaataatatatatctttttcatatcgctatttatagttggttgtcaaagtgaagtgagtaaagcaaatagtgtggaagagtatattccatcgcatcttatgaatgcggaagtgacggcggatattatgacacttgaatttccttatgagataaaagagaaattagagaaaatcggaaataaaatgagcgatagtattacaaataatttagattggtatttgaagtatgccgaagaagaaattataccgaaaaaaacgtttccttatcatcaaaacttaggtattacaaaagaagaatatgattttatgatagataaaatggataatgcagaatatataaataccaaagacggaaaactcttttttaaaaagaaagatcatgaaattcaaattctctctgatgaaaatttgaatctaattaaaaatattcgaattgatacagagaagaatacaattaaaactcctttgggagaatgcgaatatgaaggtgaaatcaaggcgtcggatgaacaaaaagctactggtccatggagtgggaagatgtggactttaaaaagtaatggattgctttatcatttttcattaggaaagttaaaaaacataaacaaatctatcatttacatttcaataaaaggtatatataaagataggattatcaatacagaagaagcagttgaatttcactcggtttcataaagaatcaaaaaaatcaccttactcgttaaagtaaggtgattttttattaaataaacaatccagcgattgtcgcagataaaatagaagcaagtgttgatgcaaatagcattttccaaccaaatttagaaacaacgcttccttgtttttcagaaagggcacggattgtaccaacgattgcaccaatttggctaatacttgcgaagctaattaagaatactgtaacgattccaactgtacgtggagctaatgttgtagctgtgtcttttaaatcaaggattgctacaaactcatttaaaacaatcttcgtacccataataccaccagctgggataatatcttgagttggaatacccattaagaatgcgaatggagaaagtacgtaaccgaagatttgttgtaaagtaatggcatgtcccattgcgcctgaagctgcactaattacgtagtttacaacttccatcacaccgataaaggcgatcattaatgcggcaacgataccagctacttttaaaccatcaagcgcaccgttaatcattgcaccgataaagctgtccccgaatagcgttctatcaaatttttgaatcacttcatcttctttcttcgtatcaactggtgttaataacgaacaaacgattaagcttgagaataaatttagcggaagagctgctagtacgtattttgcatctaacatcattacgtatgatgctgtaacagaagcagaaacggagctcatcgcagaacaacaaatgataaacatacggtttttattgaaatgctgtaaatcgtttttaataacgattaatgcttcacttgaaccgaagaatacagagtttactgcgtggaatgactcaacgcgtggtaaaccagtaatttttgaaatagcaccgccgacaacgcgaacgatgaatggtaaaacacctaaataactaaagattgaaagtagtgctgagaaaaatacgataattagtaatacgtttaagaaaaagacaaaatctctgtgaattccattaaagagaaaatcgacacctgtcgtaccaagtttaattagtttgttgaaaactttactaatgaaaataatgatttgttgaccaatctttgtagcaaacataaaccaaccgattaaaatttggaaaccaatcataattgcaattgcacggaagttgattttacttttgttgtttgacaaagcaaaacataaacctaacacggcaagaataccgataatgctcattacatattgcatgtagttgcccctttcagaagttcgtataaagtttgtacataaaacgctcgttatattactaaaaataaaggaatgaggttttatgtcatacgtaagatgtctgaccttttagaaaaataaaaataaaaaaagacccatatggattcactttcatctatgagagaaagctaatcaatatgagtccttttttgcgcataggctaatattcattagttttccccatagtccagcaatttaaggttgctgggtagaaactctcgatccatattatcaagtatatatgaggtaacatcgtccgtattaaattagtagtagcgtaacattaacagagaactatcgtcaatagctttttttcttccaatagaaaaagaccatataagtatgataaaatgtaacgcagtgttatgaaaaagagaggtcggaaaatgagtactaaaatgacgccaccagttgagaaaaacgagtttatagatgtagtatttgaagatttaacacatgatggtgccggtgttgcgaaagtaaagggctatcctattttcgttaaaaacggattaccaggtgaagaagcgcaaattaaaattattaaagtgaagaaaaacttcgcatttggtcgtttaatgaagcttcatacagaaagtccatatcgtaaagatgcagaatgcccagtatataatcagtgcggcggttgtcagcttcagcacttaacttatgaaggacaattacaggcgaaagaaaaacaagtacgtgacgttatgcagcgcattggaggactaggtgatgttcctgttcatcctgtacttggcatgaaaaatccgtgggtatatcgcaataaagcacaagtaccaatcggagaacgtgaaggcggacttgtagctggtttctatcgccaaggaacgcatgacatcattaatatggaatcatgcttaattcaggcagaagaaaacgatacattaatccaagaagtaaaacgtatttgtgaaaagcacggtatcactgcatacaacgaagagcgtaataaaggaacacttcgtcacgtaatggctcgttacggacaagtaacaggggaaattatgcttgtcttcattacacgtacagcagaattaccgaacaaaaaagcaatcattgaagaaattgcagcgaaattcccagaagtaaaatcaatcgttcaaaacgtaaatacgaagcgtacaaacgtaattttcggagacaaaacgacagtactatacggatcagaatatatttatgactttatcggggacattaaatttgcgatttcagcacgttcattctatcaagtaaacccagaacaaacgaaagtgctatacgataaaacgttagaatacgcaaaattaagcggtaacgaaacagtaattgatgcctattgcggaatcggatcaatctcgttattcctagcgcaaaaagcgaaaaaagtgtacggtgttgaaatcgtcccagaagcaattgaagacgcaaaccgaaatgcagcactaaacaacatgacaaacgctgaatttggggtaggagaagcagaagtagtcattccaaaatggtacaaagaaggcgtaattgctgacacaatggtcgtagacccaccgcgtaaaggctgtgacgaagcattactaaacacaatcatcgacatgaagccaaaacgcgtcgtatacgtatcatgtaacccagcaacattagcacgtgatttaaaagtactagaagaaggtggatataaaacacaggaagtacaacctgttgatatgttcccgcatacgactcatgtggagtgtgtggcttggttaaagcttgaaatataggggtttgatattaattgttgatggggttgaccacaaaatgaccacatcaacaatttttttatgattttaacgcctcacttagcgctatagtggcactttcttgcatatctaatgtaacatgactataggtgtccaatgtggtcttaatggaattatgtcctaatcgttcacttacgattttcggattaatacctaatttaagaagaagtgtggcatgagtatgtcgtaagtcatggaatctaattttaggcacttgtgctgtttttataaacctttcaaagacagtagttaatgttcttggatagattggtctaccatcttctctactgaaaactaagtcattatcttcataagctttaccgatagctaatttaaattcattttgttttgctttataactttttaactctttacataagctttgatcaatggaaattaagcgtttagaacccgatgttttcggttctgtatatcgaaatcctaattcatcgtaaattagagtttcagtcacactaaccttaccttcaactaaatctacatttttccactttaagcctagcaattcacctctacgcataccggtattaagcgcaagtaaaaataaatgatagtaaataggattgtcaaatttagcgtatgttaagaaggttttcgtctcctcaattgaccacgtattattgaccacttttcgtgggcgagggatttctacatgttcaaacggatttttatataaaagttcccatttaacagcatcttctaatgcaccttttaaaacgataaaaatatactcaatatatttaggagataattcgtcatcgattagcgatttaacaaatctttgtccatgtagaggttttaaatctttcagtttatgcgaaccaactacaggaataatcctactgttcacagctcttctataattaatgaatgtagaatctctcactcgttgcttagctgtgttttcaagccactcctgtaaatattcactgagagtaagatttttatcatcaactagactcccagtattaaactgatgaataagttcattacatgctctttcggcttctttctttgttttaaagcctgatactgttttttgttttctttttccagtaagaggatctcttccaatatcaattgtaaatgaccatttttcaccgcgttttctaaaatatcctttcattatccatacctccttgaactaatagtattcgaatagcacaaataattccagtattagaaaaaggaaatagacacccattcgagtgtctatgtggtaaaatatatgtatccatacttctgagcccacataatttgtgggctttttttattggtacaaaatcagtattttgttaaatcattatcatttgatgtactattgttcgcttctttaatttgctcagatttgttttttatatcttcagtaatggcaatatcaatattcccttttgcttttttgtattcctgtagtaaagaattaacattttgattaaatgagattaaactaccagttggagagttcacttgctcattaagtgccgttacgatgctatatatctttttatattcatcgtaaagttccttatattgttcaggttgttcttttgcagctttagagataactttcagttgttgtcccatctctgagtacaatagttcagcatgtttaatcattttatcagactctgttttttttgatattatctccacattaaaatcttttctattgttaattgcctcagaccatgtagttgaatagcctgataacacagttgttgagaaccattcaaaagaatcgatgtcgttataaaaattcgcggctgccattagatattcgctttcttttttctgttccagagcaacggccttatgatcattttcgatccccattgtaataaaaataattacgaatagcactacaaaagaaacaatagatgttccgaaagatattgcagatcttacgaataatggttttgtctcattgtttttcttcttattaatgaatcctataattagaaaaactaatgcagctataagcgcaataatactgaaccaggctaaagttcctcctacagcttgtccaaaaacatatcctattccaaattctgagtctccaagcttaatgctattatagagtcctctaataaagagtaggattattatccctatactaattaaaataaacattttattagaaattttcattcttaatcctccaaaaatataaaatgtaagatttctgaagttagcatagcaaacaaaatattaataacttgtcatattatgtcgaatgaacaaataaaaaagagaataaatagctttcttactcaaattgtcattgttgataataattcaatctcttattgtgaaaaaaacagaacaaaggttcgctttttgtggtattatatctataaagtataaaaataacgatatgaaaaattgcatatgtaactaaatcttgatttatagcgataaaaaaactttctcaacatttgattaacaattattttattaaaatttttaaaattcgtgatagtatggaagtaactaaaaatgaacgaaaaaagacccatatgagcgtgttcaagaggtgtctgctaaacgttctcttgaaccgttccctaaccagtacttaggaaacactttgctacatacgagtcacaactaagtataacataaaaaataaatattctcttctcgtattttgtttccaacttttttgaattgttaggtggtgtccgtgttcgggaaaaggaagtgtttctagtgaagagtttaatgaaactaataaaggagcgaataaaaaaagaagaattaacgtttcctgacttagaaagaaaaaccggagtagatcgtgtagtgataaatgatgcgatcactggaaaaacagcagaaatgaaattcgagaattttttgtgtgtggtatctgaaatatacagagatgttaaagaaagaaataagataatcagacaatttattacactatgtaaaaagaatctaaacgttaggaaggctttgtgttattgccaaggaactggagaatatgaagtaatagattatttagttaataaacatagtaattgtaagttgttaaataaatatttgaaagcgtacaaattgtttaataaaagaaatcaggataaaaaacgtggacagcctttattggatgagattaataaaaaggtatttcccaatgatccagaatgccaagtagttattaatattctgtatgcattgtcgatgcatgatatttttaatataagggcaatgaatccatatttagataaggtagagaaaaatttagtagagattaaggatggatttataagaaattggcttagtatgtattttaatgaacgtatggcctatgtgaatttatttgatgataaattagaaatatgtagagagaaatgccgtaaaatattagataacgaaatggaagtcccaataaccaaagcaactgcattgtgctgtatgggagaaagttatatgttcttggatgtattaaaatcagaaaagtatttattggattgcataaagtatttagaggacaatggcataggaagagaaagtcgaaaatataaatcattccaatctactttagcctttctttatatagataatggatttaatcttgataaaataaaatttgaataccttgatacatctgaaataggatatttcgaaggattatatggcgacaaaaataaagcattaaaaatatttaaacagttagctgcagaaagaaaaatggattctccattcacaatgtactatatttccagaattaacaatgatatactgggattaagggaatctttgagacgttttgagcgtgttggtaattatcattatgctaacgcggtgagacgaacgttagctagtatagttgaaagagtgggatgaatatgaaaaaagctagtatggtagtattatctattctgactgtaatgactttaactttaaatgttagtggagcaacaaaggatagtaaaagccaattatctaaacatgaagtacaatatatgatggttgaaccaggtggttcttaaaaattaaaataacaatgaaaaaagagacgttgcgtaaatcgcagcgtctttcgtactttttagggactgtaggttttttattgacggcaaaaaaaccgacacctatttttttccaaacgtcatttttataaagaactaacggttattataatttgctataaagagaaactctaaaaattattaaattacaaacaaaatatacagagggtgtagggggaaattataatggtaaaagagcaagtagcaaaagaagcggcaattaagttgttattagagggaaacactcccaatactgaggaacaattagaacacttactagacggtttatttaaaataaaaaaagactaaccacagaggttagctttttttatttttgttctttgttttgttgatattgtacatacatttctaattgttcccaagcttttttctgttcttcttctgataatttagagatcagttgttcaatctttttccccattgcggttgcttgtttatcctgttctgcggttaatctttcgtcagtggatcttcctaatagaaaatctacagatactttataaatatcagctagtttagataaagtatcataatctggttttcgtctcccggattcgtaactagaaagagtcccacggtgtatttctagtttttcagttatatacgtttgtgtatagccgcttttttcacgacaggctctcaatctttctcctagagtcataaatttattcccctttataaataaatttctatgtgtgagttacattacattcgaattgttgttaattacagtatatatactttctgacgactttacactgttttttatcaatttgataaaaaaaatataacaaaatgacaaaaaacatgtttacttcttcagaatgacgacatataatgaaaataacaaatcgtcaaaacgacgacttggaggtgaaacatttgtctataggcatgagaatacgtcatatacgtaaagaaaagaaaataactcaaggagaattagcaagaatgcttggctttagcggttcttcagctatttcttatatcgaaaatggtcagcgtaaactaaacgccgataaaatacccaaattagctgaaagtctaggcgtaactattgaagaaatttttttgaatgaaagtcgtcaaaatgacgacaaagagggagaggatgaagaatcatgagaaattcaacagttcaaatagcattatcacttacaaagttttcagcccaaaagggatggagggatgaagaattttgggaggctattgagttacttcgcttcaataaagaagatgaaagacaaacaactgtagaaaagttagatagcattccagtcactaatgatagcgcgaacgattatccgcttatgttaaacgtaaaacacgtagaagaaatattaggagtagcgaaaagaacagcttacggcattatggatcaaaagggttttcctttagtgaaaattgggagaaagaaagtagttcccagggatgcattctttaattggatagaaaagggggtgtcagcatgatggaagatacaacatcgctagctttattcgcaatgtttatcgcatgcagtgcgtggtcgctttacattacttacgagccgataaaacgttgggcttggagtgatgtagaacaaaataaaaagacccatagcagtgggtcctttaagaaaaacaagttgttataagtataccacggaaagtagggaaatagtatatgaattcaatcgaatatcaagtgctattacctaataagttttgggacttagcagatagtcaagatcaattaaagaagatgattgatcagtatttcaaggttggttatccgcattatgaaattcaacgaattatcaaaagtgggcaagcatatgtggcagtttgtacgaggaggtaaataaatggcaacgtttcgagttaataaaagtaaaaattacacaaccattaataatacaggtcttcgtgacgaacgtttaagttggaaagcgaaaggaatattggcttatattttatcattaccagatgagtgggtattttacatggaagaaatagcgacacacgcgaaggataaaattagtagcttatattcaggaatgaaggaacttaaaaagtacggttatgtaaaaaggttccctgtaaaagatgaaaaaggaaaaattattaaatgggaaacaatcgtttatgaagtgccacaagaggaaaacccatatgtagaaaatccacaaatggacattccacatgtggagaatccatatatagaaaatcaaacactactaagtactaataatttactaagtactaataaacaaaatactaatatacaaagtagtagtagcatcttctctttttacgaaaataatttcggcattttaaattcattcatagccgaaagtatttcacaatgggtaaacgatacaagcgaagaacttgtacaagcagctatggagcgtgctttgaaacagcagaagaaatggaattatgctgagggcattttaaaacagtgggttaataaaaatattcgtactttagctgatgttaatgcagcagaaatagagtttaaaaacaaaggtaaaaaaggagagaaaaacaatgcaagcgttaggaaaaacagtagcttcatcgaaaaatacgattttgagtaaatttgctcaaagttatgtgttgtctcctaatagatgtacaaatgttttcttggtcggtaaagacaaaattaaagacgtttgtaataaacgcttacttatagatacaaaaacaaatgaagagttttgtccacaatgtagatcggtagagcaagaggaccagcaacttgcaaaagaaacattggctattaaaaagaaaaacgaaattattcatttatacgattcgttttcagataacagccttattaatcctaaattgaaaaaagcaacatttgatagttacgcaccacctacacaggaattagcaaatgctaaagaagtaatgatggattttgctagaaactttgaacctaacaagtcagaaagcattgtaattacgggtgactatagagttggaaagagtcatttatgtgtagcggctacaaaagaaattatgagaaaaggctatagcgcaatgtttatagaaatgaacgctctcttcacaaaaataacatctacctggaataaaaatagcgagttaacagaggacaagctaatgtctattctcgcaaatgtggatgtacttgtattagatgattttggagccgagtttacggaaaaagatgctgagggagttacttggaagaaaacgaaaaccaaggacattctagagcgtaggctaggcagaacaaacttatttacaacaaactttggagttatggagttagcaggaatgtacggagagcgtgagtttagtcggattatggaagatactcaagtgttgaaaatgaacggtgaaaattacagtttgcgaaacttcaaaaaggaggaataagcatgtgtgtattatgtcgtgataaaggaattattcgtaaagaaatttatccaggtgtagctctaacggaagggtgtaactgtgaggtagcaaagcagcagcaagaagaaaacgataagcgttggcaagcatggttaatcaaatttgaatcaatgaaacaagagttgaaacggaatcaacaacaaaaagttagctaaaaagggggagaaagttatgaaaaacacaggtgtttcaagaaaagtggacgagctagggcgtgtggtaattccagtagagttacgcagaaatttaggaattgttgaaggtacagcattaggatttcatgttgaaggggaaaacatcgttttaaaaaaacaggataagtcatgctttgtaacgggtgaagtttctgaatcaaacatagagttgctagagggtcggatgtttttaagtaaggaaggtgcaagtgagttgctgggcgctattgagaagagtgggattgtaaatgcctaaacaattaaatattttcgatgtagaaccggaaatttgtcagttcgatgtaatgaaggccaatgttaagaaaggaactggacgcaatacatacgctgatgtacgcgtccaagttccaagaaatgcaaagggtacggatgaattaccacgcacaactaaacaagatgatcgttatgacatctttgaacaatatgtaatggcaatttggagatttcaaagggctgtagataagtttttcaattgggatacggctgaagaattgtgtaaggcagcaagggataaaaaagaaataattccggtaaggatttacttaggaagtggattcaaacctgatgttgtcgagtacatgcggtagtaaaagggagagggacatatgaaaaaaatagaaattgatgttagcagcaacaaactttatatagtcaaggacgggaatgttacggcagttaacccgccaatcagtggatttggtgagcaagtcgcagtatgggttaacggtaaagtggatcgagtggatactaagtttactgaaaagataaaataatcatttttagaaagtaggttcgcttatgagcgtagcaagtaatcatgaagcgatgaaggaatcaagattaaaaatttacatcgctttagaggaagctaactttatttgggatgaaagagatgtaattcgttttcgtgaaatgtggaaacaaggtatgagcttgccaaagatggcaaaagcgttaaggaggcaccaagcggaggttgcgctccttgtgatagaccaagctgatcaggaattaataacaaatcgtccgataggattaggaatttgctaaataggaaggggaaatcaaaatgaacttaactaaaatattcggaatgcaaaaggtattagatacaagaatcattaaggagcatggattggaaggacaaaatttattttacaatatgatccttgctttacaggtggaaattggagaacttgcaaatgaaacaagatgctttaagcattggagcaataaaggacctagtgaaaaagaagttattttaatggagtatgtagatggatttcattttatagcttcactagggaatggcatcggatttaatcctaatgaatatagcctgaaattattagaacataatgcaaacgtctatacggcaagtacgttagtcaatcaatttaacaatgtatatgaaggtatatcggaatttcgtgcaactcaagatattgagctttatgaagaattattgtactcgtttttagggttaggtaagaaattaggattcacatttgaagaaattgaacaaggttattacaaaaagaatgaagtgaaccaccagcgccaggataacggatattaagacaaaatttgaattttattagaaaaggagaatgagagatatgccaaattggtgtgaaggtacttttaaagttagaggagcaaaagaggatgttagaaagtttttattggaagcactaactcctattccaaacggattctttgaacaaacgcctgtggaaaagatcgtagaggaagatgagtatgaaatcttcatcaagtcagaaaatgcttttcatattaaaggaacacgtcggaattttatagagagtaacattcaacattattttgaagatgatgaagataaattagaaatatgcgtactggaagattataaggcggcttggggcatagatgcagcaccattagcaaccttgtctaaagagtacaacgtggatataaaaatttatgcgtttgagaaagggatggaattcaaccaagatgttgagattcataaaggcgagattattaagaacgtagagattgaatttgataattatatgtgggaatgcatcaatcctaatatgggcggatgagaatcaaacaaaagcgttattttaatcgaaaaggggaattagagatggcatacacaatcgttaaatacgatatggaactatggttcgatgagaataaagaagcggaagttataaaagtagtagattgtgatttggcgataagcactaacattatgatagatggtaaagtttatcacgtttgcgcaaaatacccaaaaaataatttgatcggtgttagagaaatacaattacagtctaaaccagaagatgtcgaatatgaagaacatttaacatgcccttattgtggcgagaaggatgtagatgcctgggagcgttcgcaagacaatgacaaaattgattgtagtatgtgcggttctgaaattgagtattcaagagaagttgagattacatattcgactaaacctatcaaaagaaacaatcctataaagctttaaccaaagcattattttaatcgaaaaggtggatagatatggcatacaatcacgctctatacacgttaaataaagagaaaaagagattggaagataaaatcgaggatatagaagatcacgttttatatcctactaataccgaacgcatgagaagatcgatgataaaaatgttcgaagagcaattgaaaagtgtaaacgatggaataaaaaaactgggggaatcgggaaatgaataaggacattcaatttttaaaggaattgcagcaggaattaaaaacacaggaaatcgattgccaagcatcaccacgcttttggactttaatggattataaatgggttgtaactgcagaagggtaccacgaaagaacatcattatactttgttaacgattgtgaagctgtaattgtcgatgaatacgtaaaagaaattattaacgatgaaattgaacatgaacttactgaagaacagattgaagacttaaaagaattgcaagaatacgcttctgaatacgacctagttgagtggattaaagaaaacatcgatgaagattgccatttagtatacgaaaaggaagaagcattcattgttgaaaatacgatgttcttaactaaagcggaagctaagaagcacatagagttaaacaaacatcattacacaagcaaggtccacacatacgctatgacggcatggcgggcgccaaaagtggaacgattgttgaatatattagaaacatttgattgggagtcaattagtacaaaatagttattttaacacgaaagggagaatgagagatggaatggatgtacaaccttactggcaatgaaatttggacaagtgatcgctttgctactaaagaagaggcgattgaggcagcgaaggaagaaatgaatgaacttgaaaaatatgatggagttccttatggagataacttttcaatcggacagataagtgattatgtgccatatgttagtgcagaagatgttattgatcaagttactgtaaatgcgtatgaggcatgtggagaagtttcagaaagctggttatctaaacctagccaagatgaaatagacctacttcagaaaaagttagattcaaaaatcagcgaatggctaaaagaaattaaggaatatcctacatttggccagatagttaatatcgaagtagttaatcgttaatttataacaaaattcttattttaaacgagaggggaaaataataatgagatattttgagtttgataaacatgattattacgctttgatggcagttaaagatggtggggaagaaaaagcaatcgagctatatgttgaaattgtagctggggaaagcatcaaggaagtagaggaagaaggtttaccagtagagatcacgcgtgaacaggcactatcaaagtatttagatgtaatgggtagggatgatatttcagaatggattaaaatgtttgatcaatgcgaaaaccttccgttgttaattgatggaacattagtttaaacaaaatttcttaattaatcgaaaaggaggtggcaataagtgaaatttttagttttaaaattcgatgatattttaaaaatgacatccgcgaacgaaagggatattttagaggggatttcacgaaagatagagtgcgaaagggagaaacaagggcgtaacccacaacctaaatattatgtggttaatcaagacgagccgtatgcagaggaagttctaaacattataaaaaagcacgaaggtgaaatataacaaaatctttatttgatagggggagacaaaatgggctgggagaaagtaattgagcaaaaggaaatgacaacaatcgaaaaactacacctgatatgtgacgctagtttagtacaagggaagagcatagtagttgaagcgaacagttttgcttggatgattcggactattaaggaacttagtaaggagggaaacaagtgatttatgaagtcatagattattgctctagatgtgatgagaaattagaaaactgtgagtgtgaatgcaggaagtgtgatgagtggttacacgattgtaaatgtgaagagaccaaataaattcgttatttgaaaggataaaacaatatggatcatacacttacagatattaaagatgctatttttttcatcgaaaaagatggtaagccgatgaaagtggcggaagtaaagggtgttgagtttaattttaagttcgaaagcaagcatagtgtagaaatcccgcaaaaaacaagtttcagttttgaatccgagctaccagatatagtaaaggaattaatgggtatgggatttactccgcagcaagcatggaatattcattttcgccaaaggagtaaatggaaagcacttcaagaagagttaacaaatgaattagatatgatgcaattgcttgataaggtaattggtcgtgttgaggaattagagtgtttattagaagaaattaaatgctatgaagcttattgctggggtaatgatcggaattttattgatgccagaattaagcaagctttttcataaaatcgtaatttggttagaggtgaataatcataggctactatgaaatgggattagaaattgctgcaatttggttgtcttttgatatgcaaagcggggaaataacagataactatagagataatgttcattgtaagaatctaaatgaacaggagttgaagtgggtagttaatagagcgaaagaacagttggaaaaagataaaaactgaacaaaaacgctattttattagaaaaggagaatgaatgatgaaaacatttactgtaacgtatacggaaactaaggtgtatgagggaattgtagaagcggaaacattagaacaagcagctgatcgcgttcgtgatggatatgtcgaagaagaggtgctagttgaaaaagacataactatcgatgagctaaaactggaacaaacggaagaaccggataacgttcgaagtttggttataaattacggagaacttagttttacgaattttgaacatgctgtaaatgttctttcagaggagtatggatttgaaggtgaagcatgggaaatggttgtagcgagtggagacttagaaatattatgtgagtttctaagcgaagatggtataagtgcagaaatcgaataaaaacttcattttagtagaaaaggagaatgaaagatggaaattacggttaatgaaacgggatttaatgaagaaagaatgagaaaaggtaaagtaacgattgttacaaaagctaatacatttacgatccatacagattatgtagatgatgcttattatctagctagcgtactagaagatgtagcagaggaaattgaagttaaagaaaactgaacaaaaatttcattttgtagaaaaggagaatggatatggatataggtatgaatgaccaaactgtaatcgttagtattccaccagtagaaaagtggccgttaaaacaacttaaatcagtttgtagacataacaaaataaaaggttacacaaaaatggatcgtgaagagttagtgcaacatgtaaaagaaataatcaagagcatgaagcctattaaagagggggaattgatatgaaatactttgagtttgataaacatggatattgggcaatggttgcagcagaggatgaagataaagctatcgaggtttatgtagaagaagttgctggagaaagcattaaggaaatagaagaagagggagaacctacagaaataacaagagagcaagcattaaacagatatattgaatcgtcaatttcagtagcaggatatttaacgattgaagaaataacaaaagaatttaatgagcgtaagaatacaacattactaattgattcgtcactaacataaaagagcagctagcaaaagctaactgctcatctccaagggggaacaaggagaaagtaacttaatgggttgtctacagtattgacggaatattgagttttattcaggggaggaacaagaaaatgagaaaaattaaatgtcgtggaagagatgaaagagggaagtggcattatggttattatgttgatggttatatgtttgatggcatgctaggtctttgggagtcagttccatttatagtccaaagccaattagagggtgatgttcgagttgaagctgaaacagttggtcaatatacaggcgtagaagataagaacggcaaggcaatttacgaaggtgatattgtcaaatgtcataacgatttagtctacagagttgattggcacgaaaaggacgctatgttttactacaaagatccagatggagatgaggatgaagatttgagaatgagtgcagtgtcattcgaagtaataggaaatgtatatgacaatcaaaacttaataaaataatccttttaaagtaaagcaaacagaatatagtccggctagaaaactagaggacaccaattcattaaagcagtaattaaagctgttttaggaataggtgtcctctttattttgaaaagggagatggggaaatgaaggggttaagagatcaattgcgtgaatggaaaaagcaaacaaataaagcaaagaagaaaaagaagaaaaaacgaaaagagaaatttagcactcgtgatattgaagatttaatgggcatgcatagaccttgttatgaacgaagacgtggagcaataagacaaaagtaatctaaaaataaaaaggagtggtcttacatgactaaacaattatctttcttaccaaaaatcgatagaacagcgacacaagaggaattagaaggtgtgttggaaagcgtacgtatacatagacaatttgggatgatgcgtaaagaaatgaaagtcactccttcttatgaagtacgtgagcatggtcctacacatacagttggaaaaccattagaagatgttgctatagcaaatattcaacaaagtaaacgagaagagtggcttgaaagaatgtcagtacgtatcgatcagtttctaaatcgattaggaaatggacgtgctggaagtatccaaagagatattatttataaacgttatttagaagaagaggacgtatgtgattacatggtttataacgaaatagggatgtcagagcgtacttatcgccgttggaagtctaaagcattttataagcttgcttttgcacttggattagaagtttacgagacagaagaaacgggaggtaatgaataatgaattttgttcaaccgatacgtgatccggagcaaatacagcagctaaaagattattttaaggaaaagagcttacgtaattacattctcttcattatgggaattaatacaggcctgagaatctcggacattttgaaattgaaggtaggagatgtcaaaggtagtcatatatctatgagagaaaagaaaacagggaaacagaaacgaatacaaattactgcagcactgaaaagagaacttaaatggtttattgaagaaagagaagataatgagtatttattgcaaagtagacaaggtaaaaatcgtccaattggtcgtagtatggcatataagatattaagcggagcagcggcagagtttgggctagatgaaataggaacacatacactgagaaagacgtacgggtatcatatgtacatgcaaacgaaaaacatagcattacttatggagatattcaatcactcgtcagagaaggtcacgttacgttatataggtgtaaaccaagatgcaatggataaagcaatgactagatttaaaatctaagcattgcttttctttttaaatctatacagttactcataaatttcgtactgtgtaactcaaaagagaaagtgaaacaaaatcaatgatatcaaggggtttggcgaaggggtcagttacacacaatacaagatatgggtaagtcattagaggaaaaacaggaggagtaagtagttgccaaaaactactgatttgggtaaaacagttgcaaagagtaggtcaggatattgatagggaaaaataagtggcagagtcgtgaccgctttttggcaggaaatgtgccggttgttttggaatttacgtgatatatttgtattgtgagaagtggcggaaaacacaactcataaagattcctttataatttatatgttgtttaaacgattccgtaatggtagcaaattaaatccgaaaccagcagatggtaacgattgaatgataccattattaaggagagcttttgctcttctttgagctaacaacatcctaggtagacagaattaggataacctgataagttttccgatggtgtctgtcgtggttgttagctgaaagaagaataaaacttcacataccgtaatcaaaatgcaaatcaataaatgataacaaagcatccattcgggtgctttttattttggaggaggatgagggatggataatcaatatcttgcggaaagaatcaatcaattagaaaaaacagttaatgatttagatagtgtgaatcgagatcaacaaaaagtgattaacgaattatctatgagaattgaaggtgtaatcaacacgattgatcatttaaaaaaggaattaagcgctaaaatgaacgatcttcccaaagatgcgcaagaaaagatagagcgattaaagaaagccgcggagggaattgtagatggctaataataaattaaagattaatatagatactgaaactaatacatctgaagcgttaaaacaaatgaaggaagtaactgaagttgctaatgaatgtgtggccgcattagagaagttggaaaaggttattggtaggtttactaataataatgattcgattgaaatagaagttcctctctttctaaatggaaagcaaatagctgaagctattactaaggttgaaccgtctgggaaatctcagattgcacttgctaaggagaaagagttacaggatcattatgaatgcgaatggtgtcataaagataaagctatccatattatcaaagaccttcgttatggtgaagaaagaaagatatgtacgtcttgctatctatctattgctcagaaggtagtgtctaacaatatggcagataaaatgcggaagaatatatgatgttgtggttattaggttatttaattgtaggtatgatatatgtttcttttggtatgcaaccagctttacgtaagatgttaaaagaagaagagggtgatactaaacaagaagcaattactattgtagtaatgctcttagtcattggaatcttcacacctgtttggccagcgttagtaaccatgaagattgctggtgtgttttataaaaacaaatataaggagtgaggaggtgaatacattcttacacaatgtaatcggtgtaaatgaagctgcatctattctcaatgtatcatctggtcatgttaagaacttatgcgctgaaggaaagattgttgcaaagaagataggtaagacatgggtgattgataaatcgagattaagaggagtgagataaggatgaaagtagtaattaacaacattggctttgaaacaatagatgtacttacaaacaattccacgaaggtttttagtcagatagaaacagtatttgtaaggtacactgtggttaaaggtaaacatgaattgtcaggtgtaacaagtctcgaatttagtgaatataaacacttccactacaacaaccttatcgatcatattataaatggattgattgtggatagtaatcatgttactgaagatatgtaagtgtggtaagacagtaccgatggaacaaggtatgtgcgaggagtgtgctgttgttactgaagaaagaaggaaacaaaggcacagagattacaaggcgaagcgaacggatacggacaaccagaagttctataactcaaagccttggcgagtaactagagcaagggtaaaggatagagacaatgggttgtgtcaactatgttggagtgagaacaaggttaaaccaatgaacacagtacatcatattattcctttagaagaaaataatcgattagctttagtaagaagtaatttgatttcattgtgtgagaaatgccaccagaaagtccataagctgtatgacgttaggacagagaagttcaatatacagaagaagttaagaagtttgatagggtagggggatatcaaaaacttttcaaggagggcgacgagtcgccgggtggtcttttttttcgcgaaaactccctaaatgaaaattccgaaaggaggaaggtggatggctagaccgagagaacctgtggatttagttgtactcaaaggaaaaaaacatttaacaaaagctgaaattgcaaatcgtaaatcaaaagaaatcaaggcgcctagtgataagattagggcgccttcttatttaccaaaagatttgagaagagactttaaaaaaatatccgatgagctaatcagaattgaaatcatgtccaatcttgatgttgatgctttagcaagatttttaatagcaaggaaaatgtatgtagaaattacaaatgctatgcttgagcttagtccgttagaagaagtggtggatgtaaaaaaggatcaggaaggtaacatcatatctgagaataggtataccgtatctaacggcgtgtattcagacttacttataaatcaagacaaactttttaaacaatgtagacaagcttccagcgatttaggtttaacaattacatcaagatgcagattagtagttccaaaacagaacgatgaaaaacctcaaaataaatttaataagtttatgtaggtaagttgtatgaatagggtcacacagtatgctcttgatgtattagaaggtcgagaaattgcagggaagtacgttaagttagcttgccaaaggcacttagatgatttggaaaaaagtaagttggcgccgttcgtctattattttgatgaggaaaaggcagatcggttacttgagtatgctgaaactttaatgataggtgaaggagaagaagtagaaccacttactttagcatcattccaagcatttatttttggatcattacatggttgggtccataaagaaacgggttatcgtagatttagaagtagttatgttcaagtgggcagacaaaatggtaaatctatgatgaatggtgtattagggacatattatagcaattttgatggctataattatgcgcaagtatactgtacagctacaaaacaggatcaagcaaacatagttctcaaagaaatgattaagttcattgaaacagatgaagatttaagtgagtgtttcaaggtgaaagaatataaaaataccattgaagcacttgtaacaaatggagttgtccgtgctctgggaagagatacggagagtatagatggatttcgcgcttaccttggcattgtggatgaataccataaacaccctacaaatcaaatgtataaattattggagggtggaacaactaaattaaaagaatgcttaatatcagttatcacaacagcaggatttgatttaaacagtccttgctacgagttgtatgaagattgttgtagacttcttgaaggtgtatatgaagacgataaacagtttgtatatattgctcaattagataaagatgatgatatttgggattcaagtaattggataaaagctaatcctttagtagcaagagatcaagaaggaatagaaacacttttaactatggcaagtgcagcaaaacgtaggggcggaagtgaacttcgcaatttccttacaaagcacttaaatatttgggtacaattcacagacaatcaatatatgaacatggaacattggaaaaaatgtgcttcagatttagatttagaggattttagagggaaagagtgttatttaggtctggatttatctagcggtggtgatttaacgagtttaggggcagtattcccatatttaaaagaagaagtgaaaaattatttcgtacattctcatagttttattcctaaaaatcgtgtaaaagaacatatagagactgataaagctccttatgacatctggattagagatgggttattaactgttacagagacattagggggtattaaaacagattataaatatataatcgcttatataaaaagaattgtagaagagtacgagttaattgtaaatataatagcatacgatccccacaatgcagatgcctttttgaatgatcttgaagagcttggatataacagcatcatgattgtccaatcagcaaagaatttaaatgatgctacagtcgattttagactagaggttgaggctaaaaacattcaatataatcgtaaaaataaattgttaacatggagtatagccaacgcaaagacagtatccaatagtttcggtgaaatcaagatcgataaacacttaaaagagaaaagaattgatccaattgatgcggttattgatgcatataagatggcaatgaagggagaagtaggattgaaattaagccaatatgttacggatgaaaatctagataaacttggttggtaaaggaggtgagtgaatgtgggaatggctcaataaattaaaacctaagaaggttcaaaactcagtatcacttgattcggacgagtttttaaagatgttaggtattgatataggtagtgtaaataaaaataaattaagtgaaatcacatattttacctgtttaaggcttttatctgaaagtattgggaaattacctttaaaattatatagagatacaaataacggtcttgaaaaagcaacagatcataatttgtatacacttttaaaaatgcggcctaatccatatatgacttcaagtacattttggtctacagtagaagcaaataaaaatcattatgggaatgcgtatgtctatgttaatacggagagggataaagtaaaagatttgtggattcttcctagcgaacacgtacagatttggattgataatgcaggtatattccaaagggaaaatgcgatttggtatatatggggagataataaatctggtaaacaatataggtttcgatatgatcaggttatgcattttaaaacttcattatctttagatggtatatctggtttagcagtaaaagacatattgaaggtatcaattgagaacatacaaagtggagctttatatctcaataactatttttcaaatggtttaatgggaaaggcagttgtccagtatactggtgatttggatcatgacaaagcaaagaaaatggtagcaaaaattgaagaatttagtaatggtttgaaaaatgcaggaagaattgtcccgctaccattaggttttcaactcactccattaaatgtgaacatggcagatgctcaattcttagagattaacaaatatacagcactacaggttgctggggcatttggtattaaacctgcacaagtaaataattatgataagggtaactatgcaaatgttgaaacgcaacagcgttctttttacgtagatacccttttatatattttgaaaaattacgaggaagaaatgagttataagcttcttcttagtgatgaatttcaaaatggatattgctttaaatttaatgtgaatggtattttacgtgctgatttcgcaatacagatggaaggcctatcaaagggtgtaaacaatgctatttatactccaaatgaggcaagagaatttgtagatttgccgcgtaaagatggcggggattcattaatgtgtaatggaaactatgttccattagtatcagttgagaaagaccaactatgagaagtcaaggggagttttttatataaatagggggtgttttaaataccctatagaatagacttttttcaagtgtctattctatagggtacattttattttgtacagctacctttttcatatggtgaatttttaatagatattctatcagccataagttacattcttcatatttgagcttctttgaattcaataatacttaatcagcttgtcttattacttcacttaacgtaacgagattcatcttatagcaactacaacacgctttattattaataatactactcttcttattttaactttaattccattgccttgattttttaataataaatatacaacttagtaatgataatagatatacaataagaataatatacaactgttttggttcaatgctatcgatataaagactcataattggatatgaccaaggaaacagtatccaatagtttgtatgagagataaaaaaactacccagtccacctataacccctactaataatgaaagtaacgggattttataaaatattatatttattaaaaaatgtagattcacaatagttaaagagctaatcaccataaaaagtatagaaaaaattaacctttgataaacagtcccaagattatcagccgttaatactataggtatactagttatgactaaagcacatattaaataaccaaaggtaatcattaagcaaaacaaaaacttattacttaatatagtttttaaagtgattccatgataaatagcagacatatatccttttcttctgaattcgtttacaaaagaaaatgacactaatagacctattgcaataggtaaaaataatctacaaaaaagacttagaatcgctatatgcatgaaaacgccatcttttgattgagatgatacagttagaaagatttgaaaactaattggtatcaacagaaatactagtaacaggatatacaatccattatgaagactttttttatattcacctaatatacccacttatttcaccctttattattcatatgtataatatttaaaactcacagctaataacataattcctaaaatatagattgaagaacttgcaagatatattaaaatagttgtttctttcatcattacatcacttactatattcaatgcataaaatattggaaatgtctttgtgaatactacaggaaataatccataagttacgctaaaaaaaatccaaataactgacaaggacgccgcaagaattcccttttttataattaaatgaaaaagcaattgagaatatggtattgctaaagataaaatggtacaaagtaacaacatttttaaaaaatacagtatagatatttcatatccatttataaaaatatagacacccataactgaaaaatttaaaatattaaagattaaataaaacagtataaacaataaatttttagctaccaataacttgaattttgaaatgggttttgtataaataatagcccaagtaccatatttattttcagaagaaatgataaaataccacatacaagcagaaaaaatgcttaatgttagtgtattaaagtttactgtaattgctataagattggtagattgaaacatatcgggattattcttgttaaaaataaaataacttatacacaaaaagcttgataataatgaaaaaaacaaagaaaataacaataattttctcccaccaattttcctcatctcactattcacacttttaaagataaattgcattatgatagtaactccttttgtttagttaaagataaaaatacttcctctaatgttagctttttagggctaacttcaaaaatatctatatcattttcaattaatattctggttaaattaggaacactattttgatctatcattagtttgaataccccttctttttctatgctataaggtatatcctttgtatttaaaatcctttctgtggcagtagtgtcattaacatgaacaatatattctctagaagtaataatactgtttaaattcccttcatagagtaagttacccttatgtagtaatgctatgtgatctgctatcatttcaatttcagctaaattatgactagaaataaatattgtcttcccctcattttttactaaatgaagtaataagcgccttatctcgtgtactccctctgggtctaatccatttgtcggctcatcaagaattagtattttaggatcattaagaatagcaaaggaaatacctagcctttgtttcattcctaaagaaaaatctttcacttttttatcttttgctttatatattcctgtaatttttaatactctgtctatttcatctaaaggcttattaatcattttttgtacataggctaaattttcatatgctgtcaaattaggatagtaggtaggtgaatcaataaaacaacccacattttcaaataattcttctttccaatctttgatatctttattattaaataatatcgttcctttatctaatggaattaatcctaatagcattcgcattgttgttgtttttcctgcaccatttggtccaataaaagcatataaacttccttcaggaacagataagtttaaatcccttacaatggattgattgtcaaaagactttgttaaatttttagtttggattgctaatttcattttgttcctcactttcttattctcaaataaaagtaagtatctattaaattcttgatctattagatattctatttaccctttacctaatgtttgcaatttggatttagaaaatatttctcgttgttttaattttttatcagtaagttcataaactctatctacacgctctaaaatattttcatcatgagtgataataatcttagtggatggtatggcaaatatattttcaataacagcatttgccgtttccctatctaaatggttagttggttcatccaaaataagaatcggatattctttcatgaacaatcgtaacatagccaacctttgtctttggccaccggagaaatttgttcctccctctgagattaaaatatcatttatactttgaaattgaatataattactcagattcaatttatcaatagactcctggatttttgaaggatcataatttatatcaaagtaagataaattctcagataaacttcctctaaataaaactccatcctgagtcattagtcctacattttttcttagttcctcactgttccaatctttaatatctctatcgtctattaatatattacccttatcgggagtatgcaattttaataataagttagctaaagtggacttaccactgccactttctccaacaatagcaatactttcgttatttttaatgttcaaacttaagttttctattatttttttgtcatcaaaactaaacgaaatattattaaattgaatcgatcctctaagaatgtttactttagtatccgatccatctttttctagttcctcttccaagatatctaaagttcttaataaaagtggtttaactgaattccaatttaaaattgatcctataattgttgaaaccggagaaaatataatactagatatagcaataaagaagaaaatattacttaaatccccttctcctttactaaaattataaaatcctacagcaagcattatgataataaatattgttgatagggaactattaaatgattctaaagcattttgttttagcgctcgtttatgtactgtatctaagtatttattataatctttttgccatacagatttaattctagaaaaaatccctgtagcctttacataatacatcgcttttaatgattcattaattttccctctatgttctcctaggtaatacgtttcgactaaattagcattatatatgaatttccctaaggaaatattgataaatagggaactagcaataaaaaacatcaatattaaagtataaaaagtctcagtatataatagatacatcaataatggaatgataactactattgatataatcatttcaattagatcctctaaaatatatcctcgtattgattctaggctcatgattcttacatttaaatcccctgcatgacgtgtagtaattttttctatgggggtattaaacatatgctcaaaaacttttgttgtactttttctatcaatttctttctgaaagtttacttttataatagaagttatagattttatccctataacaacgattaaacttcccaaaataattaaaaggtatcttacatccacttcctttgaagcattcaaaatatccataaactttttcaaaataaaggggaaagcaagaattgagatttgtgctaacaatgctaatagtgctaataaaacaatctggctaggagatacaaaatgatcaatatatctaagtaatatatgtttttcacgccttttagtatttggctgtatatcttttttgttttctattactaggatatagtcacagaacatttcctcaaaacttcttatatcaattatcatcggccctgccttaggatctacaatataaaatttatttgctttaaccctttcaataattacaaagtgattaaagccccaaaatgctatcatcggcttttgtatcctttgtaaatcagttatattttctatcctatatgcagttgcagaaagtccatacgatttactaacttttttaatatccaacaaactccatgccgattttttattgataattttactatttctaatttccgaagcttgtactgctgaaccataataatgcataatcattgctagacaactaggcccacaatcaaaagatgtcatttgcggtataaatttaattttcttccttaacatatttatcacctattctaggcattaaagtataaaatgctatttagtttattatcctctaacctttgtaaaaaatacaaaatacttcctagccctgtaaataatgcgattttatgaggattaaaatcttctatatcaaaattattcaaaaagttatttgttactttcataacaatttgtttttcattgcgctcgagcatacctccattttctagctccaataaaaagtctagtttccccattaaaccatgacataaacaataatcactattttcatgtaatgtacttaagatttgttttttaaaaaaaattaaatctgattgtatatcctcattttgatacgattctaaaattttaattctcgagattcccattccactaaatcctttacaccagctatctgtatactcatattcactcatactcattttctcacttttatgtataccatgtattactctatcgtacttatttgtttttaatatgccttttaacttataaaatgcgagaagttgtcctgataatccatgaacaaacccctttaatgaatcctctaaatttagagtatcgtgagctttccaatatacaaattcattatgtgtttgcatattattgacaatgtagtcaccgagattttcagccactttaagcaatattttataattaggattaatttgatagaacttaactgccgttaaaattagaccagctgaaccccctaatatatcaaaatgcttatcgctatatttacctttttcaatatcagagttgacatccataaatatttgcaatatcaatctttcatcgatagatgttatatgtggtaaatttgttaaatagtaagaaataattgcattaacaccatttacaaaaccataattatttttatttttgtttaatatttcttgcagggctttttgttcaagtttatttataatttcaatctgattaggatcagcattatttctcaataatgaacttattcccaataatccatcatatattccactattcaaatggtttatctcaagctccccttgccaatttgtttttaatccaataaaatctacagcaccgtcttttgatatataactgccatcaagaattttccctgtaattgcttcctttattttatttgtaggtaaattagttcgaaaattaattgtttcctttactgtattcagcttatatagattgtcattttgattagaaagggatatttctataatttttctttgtaataaaaagtcagcatatgaaatttttttaaattttgtttctagatctatttcattatttgataaactttcgcaagactcccattcatacttattaaagaaatatggaacatcataggataatagtgcctctatctctttttgaataatatctttcctagtagccaagtatatgtttttttcaagaatattccgcaaatattttatagtctttaatttattctctaataaatccggaacatttagtctatctaataaaagggtatagacttttgtatttcgatatacttttcgataattccatttagaaacactattttttaatatacacatatactcctctttgttttttaaaactgagttatatgcattctcaaaacctttaataatatcatctatataattatcatactcgtatatatcatcgttaagaaacggtaaattctgaaccgtatcttctactattgtctcttctcttatttcaattggattcgatgtaaattcattttttattttaattgtttttaccaaagacttcattactctcccaattgcactgtaatctcttattacctccctacctccactaaaccttataggtagcattctagaatttaatactgaattagataatataaaactactggtttcttcagtaacacttggatttaatgtacttcctaatgtctcaaaatcaattatgactggtgaggattgtttagctatgatattttcattatgtatgtcacttccattaatcaaatacattaccgaaagcactacacctaaattataataataatctttaatttgctcattagattcacatgattcatgattaatgtattccatatatccataatttcttttattaactacttgcggaataaagatatccgtatttaaatctttattcagttgattaattaaactatgatatagtatagaatttttcaaatcgactggttttaaaattaccttattattaaatttatcttctaaaagaattgttctctttccattattatggtagtcacctaggttaataactttttctacatgcataatattaaaacccgacattttatgaatttctttttgatctttttcaagagcaccttgcaaccaaatcatataatttatttcattttcaatgattgtaaaaattttttcgtttaatacgggtaatattttaaaaaaattcatataaaattttttaaaatgaaagaagttctttgtaaaatacttatattcttcattggtatccattcctcttaaagcattttctaccctaagtttatttatgtatacaattaaggatggccttaatacttggtatagtcttttttctaaatcaaacattatcgattcagaaaccttctcaaaattaccaaaaaaatcaattttatttattatcatatttttaaagaatactacatatgtttgtattattttttgaaagttatagttttcgtcatccttaatgacatcattacatgaaaaaccctctaaaaagataacaaaatttttttctagatattcttttgttactaaagaatgtgatccattatctattgtattcaaaattccatgtgaattatttttcataataacctcttctttttataggtaggagaaacagttagaaattcattctcattaaagagagtaaggcctttcgccttactctctttaactattagtagcattttttacaaattctttgtcccataatcgtgacacatgctacaggcacattccaaggacaatctttagttaaagtttcaacccaaccaggtcctgctccaccaactaattgttcaatctcttcatcttctacgacttgtaaatatttttcagtttccatttcaatacctaccttttatttttttgaaaatgatgttataaattcaataatttaccacaacattatctaaaaacaatataccattaaatgttaataaaaaaaaatatatttatagaaaaataaaataataggatatttaactatattaatataattaaaggagactcacttactatatcattaaaatttaaaggctattttccaagttaatatttttaaaattttataaatttattaataatcaatgctgtttaataatttaaataattcttctaatacctgaataacgattaagaatattaattaaacttgtaaaaaatagattttcagaagatatagctcaagaatattttaccataaaataggataatcaattctttttttaatagtataatgcttcgtcagaaaattttaatcatgaattgcaaaaagcatgttaaaaataaaaagatgaaattgcaagtatattcacttcacaatcccatctcttctaaaaattgtatatcatcaactctcttgatcctcgcaattctaccaaattaatagcaacacattatgtagatataggtttatactattctacatttaaatacatgtaatattgcctatactttgttattttcatgtgaaactaattcactatatatctctttctctatatttttcaagagaatttccaacctattttttgtagctagattaaaatgtggatttaattcttttattataaattcaagtatctcaaagcttatgtaatctcctaattcaagtgaatattgatcacccaagaaagtttttaattttttagagatctccactttatcttttttggtaatatttaccccatccgataacaaacctctcttagattagtcttaaatactaattcaaaaagtttttataacataataaaaatattttggaattaatataaatcatataatgaaatttttacaaataaataaaaaatatacatcataatcattaaacaatatattaagcatcgtaaacatatattggctcgtcataaaggcgtaaacattttgaccaatttccacataacgtttcccattcaccagcaggatatacttccgtacgcaatatatgaagtggtatacgtaaattcaataaccgaccactaagcgtcgtacgagtaactcccgctggcattaaaaactttgcttcaattacctttttcagttccatcaacgagtattctggataactcatcaatatttcatttgaatgaggccagacctcagtatcatttgaatgacggcgtaccgtatactcatgttgatataagctgacaatacgatgccatatctctaaatgattaaataaatcgctatttaaatcccttgcatataaaaaatgtacttgtttatttgcttctgtaatttttgcaagcaaacgtttattagcaataatcttacctgaccaaattattgtaggttctttctttaaattatttacccattcccccattggtaataaatgattccaagcacgaatttttattttttcatcaggtactacctgtacagcaacgcgtttacaacctaatgccatcatagccttcatacgatgggcaccatcaagtaacagataattaccatcactaagctcagatactaagggaggattccgtaaaacaccttcgctttccattacacgacaaatttgttccaatcttttgtgttcatatgattcatgaaagcgaatttgcttgggatgtaagagatctaaggccgaaataatttcactcataaaaacagctcctcaaataattacataaattctaagcttatcaaataactaattttctataatgattagtcgtgtttaccgatatttagcagctattagacaattatttcaaactacgtttaataattttactagtcttctaataaaacacctatttccttttccctagccctttgatagtaataagcagcaatggctacatcaaaaatggccatacccattggattaaataatattgctttgtcataagggaagttttgcagtgctcctcggattacaacgtcagcaattgatactgtatcttctttttgtaaacctctttcaaggtgcatcctttcaacatcagttttttcacgacagacttcttcccaattatcaacaactagggattttgtatattctaagatatcaggcttaaaatcacgaagagaaacattgagtagtagcgctccatctttaggtttcttatcaatataaccttctgcagaaacagtacaagtaataaaaatatcagcatcattataggcttcttcataagcattaaccttttgagttttagaataaatatcctcaggaattaattcgtctttaattccattgatatcatataggtaaacactttcgattttatcgcctaatagggcagttaccatctttaaatgcatctgaccaataggtccaaatccaataattccaactttaacattatttaaatctcttaacttggcaaactctcgaatcattaaccctgttacagaagctgttcgtattacactgaccattgctgtattaagcgtcgcaaatggttttccagtcatagcatcatttaatatagtaactgaatgagcacgctgaatacctttctcaatattcttcggaaaactagctatccatttgattcctgaaaccttaaattctcctccaatataagctggcatagcaataattctattagccggatcatcgaaacgtaagtatggcttaattggctgagaaaaatcatctaaatcaagactttttactgcctttgaaatgacatttattgtttcttcccaattaacacccatttcattgatatgtttggtatttaaatacatcataattgcttcctcatttctatatcatttttataaagaaactaattggtcttctactgatttttgtgtattaagccattctacccattctacgttgtaaatagttgatgtgtaagcttgtccattatcaggacacaagaaaacaacattaggtgtattttgaacatccttattttcaaaatacttttggattgcataatatgaagtccctgatgatccaccagcaaatattgcatgtttattaaatagctcataacaacctgcaacagtatgaacctccggtacaatcattacatcatcaatcaatgcttttttaaccataccaggtatcatactggcaccaattcctggtatgtaccgtttacgaggcttatcaccaaaaataatggacccttgactatctaccgcaataattttaatattagggaatttttcttttaatcgtgtagataccccagcgatagttcctccagtactcactccaatgaaggcataatctaactgtttaaaatcattagatatttccccaccaattccttgataatgggcttcaaagttatcagcattattatattgatttgtccagtatgcattaggaatagtatttaaaagttcttccaccttatttaaacgcgttaataaatagccacctgtttcatctcgttcatccactttagctacttgataggaagttgctctcaaaaaattctcataactatcattaatatttggatcaataactggtatgaatttcaggccgatatacctacaaagagtagcaagagcaaccgcaaagttaccagatgaagattcgataattgtagaattttcagtcacttcaccgcgacttattgctgattttaaaatatggtgagcagcacgcactttaacactattcattaaattgtgatattctagttttgcatacagattaatcttttcatgctctaatttaatcataggtgtgttgccgattaccctttctaaactctctaatttcttgagcataatttgcttcctttcttggttaaaatctaaaaaaataattaaagataatatttgtaaatgttctttcgaatgtatttcaaatagaacttatacctgaaagacaataaatgctagattctttagtatcgataagctaagcaccattcaagtactgccatagcactatttagcttgttttcggcctgggtaaatacaatacttttcggtccatcaataactgttgctgctacttcttcccctcggtgtgctgggaggtcatgcatgaaagtagcttccggatataaagtcaaaattctctctgtcactgcaaatggattaaatgcatctttccataaaggatctattttgcttgtccctgttgtttgccaccttgttgtatatacaacatccacttcactaggtaacatttttatatcatgacattcaataactttagcaccagataatcgtgcatattcttttgatttttcaagcacacttggagacactccataaccagcaggtgtaaaaagatataactccgtacctggaaaacgagataaagaaagagctagagctgcagcactgttattaccttctcccatatataaaacccgtaatccagctatttcaccaaatttttgtttcattgttgttaagtctgttagcgcttgtgttggatgttcttccgtactcattgcattaatgactgccatacgactttgagatgccagcttttccatttccttttgactatctgcagttcttgctactagtgcatccagcattcgcgaaagtacttgagtagtgtcttctatagactcccctgtattttcttgcaaatcatttggaccatacgttacaatttgtgcacccatctttaatgctgcaacagaaaatgccgatcgagttctagtcgatgttttacggaagtaaatcccaattatatttcccgctaatatttgattaggttgcgatttacctgtggcaaactctaccccacgagttacaatttggttaatatcactatcagtaagatcctcaagagtaattaaatgttttcgaatagccattattatattacctcccttttgaataattgcatgtaacaaaaatgtatttacatatgtatgtaaatacaaactactaaacagctaaagtaaaaataatagattggaaatataattcatgtggatccattaccacacttttctataattttttttaaactaatgtatagcagttgatatatagcctatatgaactcgaatactatttttactcagaaatacttacatataattctattgttagtctatattcctattttttatgatatagctctgctgaatatattacacactacaacactaaaaatatactcaaaatacagaattttcagctttctcaattctttcatcaattttctgtcaattcatattcaaattatcttttttactaataatatacatacaatgttggctgtttcttttatagcccacttctaaaaaatccacccattcaaaaataacgttttccggattgtcagttaagatacaaattactgctgcagtcattaaagagtcctctttaaaagagatatactccttctactggctcgctatttttagttatgataacctcttaattgttacagctataacgctaacaattgttattgcaaccattgatctaagtaaacaaacaatgaatgacatactaatatatacacaaagtaatctattaagcgtaaaatgattgcatctccagcaagtttaattacttattcagatctttgcttttataattttcaaaattaaatttccgaaaattttctttccttaaggaaatatcgatcattttaaactatgtaagaatgcttatcttctataaagtaattacacaaatcaacaaagtcaatttcaattattgattctggaaaactatctaaagaagcacaacaagaaagcttataatctttaccaatagtaaactttttataataaacctcattagatagcatgtcaccataaaatattgtattttttttaataacaaaagagtttaaaggtatagttagtcctttccctatccatttaacaaagctttcttttatagtccataattcataaaacacatctaattgttgttctacatttaatgaatttaaataattaaattcttcctcagtaaatatatttttaatcattgtagtatccatgggccggactttttctacatctattcctacttcttcctcatgaatagctccaacaacccaactttcggaatgcgatatattaaaatgaaaattatttaactcatccacataaggctttccgtattcattgtatttatatttaatatctttattttcttttgagaaatttgtagtaattaaatatcttattataatgtctccaattaaggcgctatattggtcgggctttcttttatatttctgtattttcatctgcttttcttttgagaccaaactcataagtttctgcataatgttatgatctatatttcctggcacacgtaccttatatatattcattatttccttcccacctaacttcttatataaatataaaaaactctcaatgaataattcctatttatttttgattagtaaaaaacattttcagaggataatattctattttacattcatattttcgacttattttctaacctctttatgtctattattgaatgggctcaaagaaaaaagtctcataatatgttatacacgaatttatgagacttttagaaaactaatagtgtacaatttcaaataatatttcacctatttgcatgtgctaataagagcatttgtttaaaactcatttttatactctttaccaactcatgaatatgcggtttctctaacatactcagatgggaacctggcacttgcaaagcgtatacttcccctgatgtatattcattccatctgttataatctactagtgggtgaatgtcattaatagatgcattaaatagaaagatatctgcttttattttttgtttacaattatattttaggtatgcatatctattagctatcattacttttaacttattcatcattggatcttcaaaattttgctgacaactattttcattcaatgtaaattttttcagtaaagattctattaattgttcttcactcatttgctcaaaactaattttctcaatccctaactgatcattgaatttttccaattcttcaaaggcattcttaatatttaaactaagaatctccttaccttgttcaataggatgaacatcaagtaaacctagaaaactaactttatcacctagttcttctaattttctagccatttcaaatgcaactattcctccaaaagaccatcctaataaggtatatggcccttctttttttactagtttaatctcttctatatatcttaccgccatttcctctacagataagtttgaaaatctattatcatcatatcctatagattgtaacccatatacagtcttatcctctcctaattctctagccaaatcataatagtttaatataccccctccttgtccatgaacaatgaaccattgactatccttgtttgtcccattttgaattggaattaaacactcactgtctattcctttattcctacttattacatcacttaattgttcaatagtagcattttgaaataataaacttaatggcagttgtacattaaacattctcttgatattttcgaataactttaatcccttaagagaatgaccacctaattcaaagaaattatcatttataccaatattatttacgcctaatatactactccaaatatcaattaaactactatctatgtcatttcttggtggtacataattactattgtccagtgtatttagcttcggtaacttacttctatctattttcccattttgtgttaatggtatattgtgaattggtatgagttgttgaggtatcatataatatggtaactttgttgccaaatatgctcttacctctggaataggaatatctttttctgtaactacgtatgcacataaatacttttccccagcttcatcttcttgatctattactacggccgttttgattgtctcatattttaacaaactcgcttctatctcacctagttctattcgatatccccttatttttacttgatgatcgactcgacccaagtattcaatgttaccatcaggtagccaccttgctatatcccctgttttatatagtttctcacctcgttcaaatggatgatcaataaatttatctgctgttaattcttttcgattgatgtatcctctagctaaccctatgccagagatacatatttcacctggaacacctataggttgtatcctataaaatgaatccaatatataaattttagtatttaacaatggtgaacctatcggtacgttttgtgttgtaatttctttattactctcatatcgataagatgtacaacaaactgtagcctctgtaggtccgtatccatttaatatttggaggttccccctaaatagatgatcgtattttgcgagtaattctgttttaatgggttctactcccacaagtagcttatttaacactatcttctggttatctctaacaaaataatcatatatttcatttaataaagtaggtggaatatatgataatgtaacctgttcttcaagaataacttgtacaagttttgatacatcaaacttctcaccttgataaatagtcattcttgcgccatatatcaatgggacaaatatctcaaaaatagtaacatcaaaagaaatactacttgagaatagaacgttatcagttatccctatatcttgagagaaatcttcatacattgcacacaaaaaattagtcaaggatcgatgttcaatcattactcctttaggttgtcctgtagaacctgatgtataaataacatacgctaagttgtgaggttctatcatcatttgcatgtcttctcctggttcttcttcaaaagacatatccattagatctattacattaccttggaattctattccctttatttgatgtactaatacatgtgaacacccactgtctgtcagcatatattccactctttgttttggtaagtcggtatcaattggtaaatacgccccacctgcttttaagacacctaatatacctataaccatctcgatggatcgttccattatcacaccaacaatggattctcttttaactccttggtctaataaccttctcgccaactgattagcttttatatttaattcattatatgtaattcctttttcattacatacaacggctatttgattagggttccgttttacttgttcttcaaacattttatgcactaataaatgattagaatttgaattctcttttttgttaaattcattcataatacaatgttcttcttctatagataacatattaatattacgcaatcgtactctagggttattagttacttcctcaactatatttgtaaaatgtaccattaacctttctattgtctccgctttaaataacttagtactatattctacttttaaatgaatgttattatctatttccgttgctactaatgacaaatcaaattttgaaactgactgcttaaacggatacggtgtaaattctaattcaccaatagatattggattcatatccatgttttgaaaaacaaacatggtatcaaataatggatttctacttgtatccctatgcaagtctaaaccttctaatagttcttcaaaaggatagtcttgattttcataagcttctaatgtattgagttttaatctactcaaaaactcaataaactcatcgtcattttctagataatttctcattaccaaagtattaataaacataccaatcatatgattagtatcagaatgagaccttccagcaataggcgaacctacaataatgtcttcttgacctgtgtatctagataaaagtatgttataaatggccaataaaatcatatatggcgtagtaccagtttcagttgctagcttatttactttaaaagttaaatctcttcccaaattaaaagaacaaacattacctttaaagctttgtatagtcggtctttgaaaatcggttggaaaatttaaaaccgggagttctccttttaaagttgttaaccaataattcttttgttcactaattagattcttatagtaaggtccattttgccacatcacatagtctttgtactgcactctcaattttggaagctcatttcctttatacaattctacaaactcttttattaatatccccattgataaaccatcagatattatatgatgcatatctactacaaggatatgtctttcttctgctatccttaaaagcaacacccttaataatggaggttttgataaatcaaatggacttataaactcatgtattaaataatccgcatctttttcatttacatgaacgtattcaatattgaaatctacattaggctcaattttctgcactaattccccatctaaaatttgaaaagaagttcttaatatttcatgtctctcaattaaagattgaaatatattttcaaacttatctttacaaatatccccttctactttaagtattgtgggcatattataagttgtatttgtaccatcttcgaattgatctactataaacattctcttttgtgacgtagaagctaaataatactcttgttgttttacaggttctatggaaatataattacttttttccatttctaatatacattttgaaaaatcaaccaaaataggaaacttaaatagggatttaatagataattgcacattaaattctttattaacgatagaaattagcctagcagcctttaatgaatgaccacctatctcaaaaaaattatcccgtattcctaccctttgtattcctaatacatctttccaaatctcaactaattttctttctgtagaatttgtcggctctagatgactagatttcaaattatttataggttgaggtaatttttttctatctatttttccgttttgtgttaacggtatgttttgaatggatatgatttgttgaggtatcatataatatggtaacttggttgctaaatatgctcttacctctggaataggaatatctttttcggtaactacatacgcacataaatacttttctccactttcatcttctcgctgtattactacggcggttttgattgtctcatattttaacaaacttgcttctatctcacctagttctattcgatatccccttattttcacttgatgatcaactcgtcccaagtattcaatgttaccatcaggtagccatctcgctatatctcctgttttatataatttctcaccatgttcaaatggatgatcaataaatttatctgctgttaattcttttcgattgatgtatcctctagctaaccctatgccagaaatacatatttctcctggaacacctataggttgtagcctgtgaaatgaatccaatatataaattttagtatttaacaatggcgaacctattggtacgttttgtgttgtaatttctttatccctctcatattgataagatgtacaacaaactgtagcctctgtaggtccgtataaatttaatatttggaggttccccctaaatagatgatcgtattttgcgagtaattctgttttaattggttctactcccacgaaaagtttatttaacgatatcttctgattcgcccttacaaaataatcatatatttcatttaataaggtaggtggaatatatgctaacgtgacctgttcctcaagaatgacttgtacaagttttggtacatcaaacttctcaccttgataaatagtcattcttgctccatataccaatgggacaaatatttcaaatatagtaacatcaaaagaaatactacttgagaatagtacattatcagttatccctatatcttgagagaagtcctcatacattgcacacaaaaaattagttaaggaacgatgttcaatcattacccctttgggctggcctgtagaacctgatgtataaataacatatgccaaattttgaggttccatcgttatctgcaaatcttctaattgttcttcttcaaaagaaatatccattagatttattacactaccttgaaatgctactccctttataatagagttttgatatgttagtagatgtgaacacccgctgtctgtcagcatatattccactctttgttttggtaaatcggtatcaatcggtaaatacgccccacccgcttttaagatacctaatatgcctacaatcatctcaatagagcgttccatcatcacaccaacaatggattctcttttcactccctgatctaataaccttctcgccaactgattagcttttatatttaattgcttatatgtaatttcttttccattacatacaatcgctatttgattaggattctgttttacctgctcttcaaataattgaggagctgttacagtctcacaaagtaatgttttatgaactttagtcgtatgattgaaatcaaataatatttgattcttttctgttttaggcattacatctagatccattgcagatttatttggatctttcattaatatatctaaaatattatataaatgattaactattctactaactaatccttcactatataaagtagaattgtaatccacttgaacctttaactgttcttcatttttcataaacctaataaccatatcagagtttattttatctgtactctcataacaatgaatatcatctaacattactattgtatttaatacgggaagattattactctctccatctagacttaataattgagtaagtttattaaaaggaaaatgacaatgttcatttgactctaaaattgtttctttaattttatatattatttctttgaaattatcttcttgatttatttgagtacgtaataataaaaagttgttttgaaaaaccgtctcttcttgaccttgcttaaaaactggcattccaattactacatcatccctattggtatatctacttaagagatatttcacgcctgataataaaatagtgtacagtaacatatcagaattattgctaattgctacagctctcttcgcaatatccgatgggaattgacaataataactttctttagaagcctgaatattatttaaagacagacaatcacaaggaaatctacttaactcaacatcacctgataacttgtctaaccaatattctttttcttttttaaatttttcactagataataaaacctgctgggtaaatttatcaagcattttttcttcccaccattctctatgatattgatactaaatactacatatttagtggttatgttccccatagacctatccgttttatcatgagggggcacaatcatactcgtcattgggagttttcttcctcagtaataaaactcccaatgacgaccaattagattgctactttaacgatagaagtttcacataaagcatagaaatgcacttttctcttactcagatacatctcttaatttttttacttcacagattttaccctatctagtattttcataattaactcgcccacgatgtcagcttgatgtagtaaaaacatatgaccaccattaactattagaaaatgaacctcattgccccattctacccacttcttagccccttttactgtataattagagtctgttgttccactaataatatataggggcgctttcaacaatgttgtgtcatcatttatataattctcaatggcacgaaagtctgatcgaataactggaaggatatagtttaaaagctcctgatgttgtaatacttcatccggtaatcctcccaaagactttatataatctataaagtctttatcatctaaatgatttgtttttcttcttatttccggtggattcatagcagagataataacatttttaggatttatgcccttactttctaaaatttgagccatacggtgaactataattcctcccatgctatggccaaataatgtaacctctccctctaaaattggttgcatctccattaaatataaattaacaagatcatctatgttatcaactagtggagaaagattaggaccatggcctggaggatcaaatgaaataagttttatatctttcggtaaataattctttaaaggtaaaaaagaattcgaatagcccccagcataaggaacacaaaccaaatattttttactattcaatcctggcgataaatctttcattaattttctcaagtgacttctcctttattaaataaaattttcatcaaatagttgtttaatcaaacaaattatcaatttcttcatcactaaggtttaaggtttcaaaatctgatgaagtaaattcttttgtttgcatttgacaacaggattggatatatgtctgtagtcgttctagataatctgaaaataaattttctaaaaaattcttttgaaaatgacttgtactaaatgtcacatgaatttctaagcttttattcttaaccatagccacaatatccaataatgcagtaatatgattatcttttgattgttcactgccactttgataatcaacaatagtaaaccatccatccccgagagaattatctatctctcctaaatagttaaaacgaattatattttgagttaaatctttgcaagaaggaaacttctctttaagaattccatatccaattcccttattaggtcttttacgaacctcttctttaacactctttatttgattagcaatattatgcgaaacttgtaatacaataggatacatcgttgtaaaccaccctactgtacgtgaaatatcaagatgctcaaataattcctctcgaccatgaccttctaactcaaatttaatttgatcttggtttgtatattcacctaaattttctgtcaacacagcaagtaacaactccattggttgtgtattgtaaggcacatttgcagtagttaatagttttcttgtatcatctgcattcaatgtaaaggtaagagtcgtacaactttcaacagtactattttctttttctctattaatttgaaaattattatctagcgtgttatctatggattcccaataatctaattcagcatgtactaaattaactcctcgactatttaaagcttcagaccaatcttggaaagagttagtttttaatggtagcgatggaacttctcctaaatacaagctattcaaacatcggtttgcatcttcaattaaaatacgccaggacacagcatcaacaataaggtggtgtgcagttaataataacaactgttgatcatttgaaagctggaataaggcccctttaaataatggtcctacattcaaatttaaacttccttttaactcttcaccttttatatgaacctgattcaaagccatttcaattggaatttcagacaaatcaaacatggtaaccttagaatcaacaatggacatatcttcgtcataatagaagtaatcctgcttatcctcgtaccttaaccgtaacaaatcatgatgatgcatgatcgtatttaacatcttattaacatattcttctttaaccggcttcttcaaagacagtaataccgattgattccaatgatgcgggttcttaaactgttgatcaaggaaccaacgcataataggcgtaggctctacctttcctgttaccaatgtttgtgagactgtaacatctttttgtttaactaacattgctgccaattcacttacaactggataatttagtacatctttaactctaactttccatcccagttcttgtaatctagcgctcacttggatcgctttaatagaatctccacctaaatgataaaaattactatgcaattcgattctatcagtctgtaatatttccttgagaacttcactaaccattccagtaacatcttcatctacttcttctaaatgagtatgattagaaccgttatttaacatcggatctggcaacgcttgacgatctacctttccattgatagtaagcggtagctgatccatatagataaaaaatgaaggaatcatataacttggtagcatatgcgaaataaaactgcgtatttctatattttgaacactgtctttcaaaacaatgtaagcaactagatgatttgaattatcctcaccttgccaattcaccactactacatctttaacagacttgtgttgtaacagtgcattctcaacttcccctatttcaatacgatatcctttaactttcacttgagaatccatccgtccttgatactcaattaatccatttggcaacatgacagctaagtcaccacttcgatacatcttctcactcgaaataaatggattggataaaaaacgttgcgctgttaaatccggacgatttaagtaacctttagctaccccatcacccgatatataaatttctccttttacaccaataggaaccggctgaagattcttatccaataaatatatttgaacattatcagctggtgtaccaattggtacggatgctcttcgatctagatctggatcataacgatgaatcatacatccaaccacagtttcagttggtccatattcattaattatttcaactttaccgctaaaaagatcatatatcttttcggctactgaggttttcaaatcctctccacccacaatcaatctgcgaagagatgaaactcttgggggtgaatagttatttaacaatgctaaatgtgaaggagtaactttcaacactgttactacattttccttgagtatttttgacaaaataaactcatcttcattatcatgatatattactaacaataaaccacttattaaaggagtgaatattgaagttactgttaaatcaaaagaaacggatgaatataatgcaaaaacatcattttcactactaatatagttctttttagcccaggaaatatagttaaccaatccacattgagtgattacagttcctttaggattccccgtggttccagaggtataaattatatatattggatcatttggtgcatttactaggtttagattggcattatctccttcataaagtttctgatcacatatattaattttctcacctaaatattctaaattaccctcatttgtatagtcagttaaaagtaatgttgtgccgctatcattcaaaatataacgaattcggtcctctgggtaggaaggatctataggcaaatatgtacctccagccttaataactccccaaattgcaattactatctcaagtgaatgtttagctagtatacccacgacttgaccatttttgactcctttttctcgtaactttcttgctaactgattagatttcttatttaattcaagataagtcattgatctatcagcatgttgaattgctattttttctggtgtctgttttacttgttcttcaaataattcttgaatagttttttctttcggatacacaacagctgtattgttaaatttctctaacataaacttttgctcatcatccgataacaaagataattcttttatcgattgatcttcattacgtaaaacttgttctattaaagctaaaaacctttcatgcatacaattgatttgatcttcttcaaaatccgcgactttataatcatattgaatttctaaaccttcatctgcccattccttaataactaactgcaatgaataggcttggtaaccactgtaaaactccacgttttctaaagaaaatccatcaatagtatttttaagttttgtattatagtaattcacactatattgaaataaaccatcgtatcctttactagtcaattgcaagtcttttaccaataagttataaggataacgctggtgaaatagacattgttttatttcatgatttactcttttaatgaaagatagaacactctcatcttcatccacatttaaccgtaacggcattgtgctagtaaacatacctactattttcttttctagtacaccggaacgatttagtacaggagatccaatgattatgtctgattgatcatacattttatgaatataaataagcataaaggttgaaaataatgtattcatagatattctatgtttttgtataaaagactgtagagcaaccgatttttctttttcaattaaaaatatctttcgtttcccttctagagaatgagatgtttttgataaaaagaaatctggcagattcataaatttctcattccaataattcttattttttacgtatcgaggggattccagatatttctcctctgcttgtaaataagacagataagtagattcaaccgtatcatttatatgctcatcattctttaacttagagtaaaaatcgataatttgactcgtcataagttggattgtccaaccatcagctataatatgatgaaacttaacaaaataggagctttctacatcacttattttcaagagcacaaattcaaacagagggcctccttcaagtggaatttgtttttgaaattcatcctgggcccattttctagcttctaaacttggattatgatgattagaaaaatcaattaaacgtattggtgtaggttcaaatggtgatatatattggtggggttctctatgttgttgaaaaatccgtagacgtaaaccatcatttttcttaatgaataattgaattgctttttctaaaattgtaaaattaatttccccattaataagaaccatccctccgatgttatacatagatgtgtttggataaatttgttcattataccaaactcttttttgtggatgcgtaagagaatgctttacaattgtttgttgcatatttccacttcccctctatccacatccgttggtatttccggaaattgtatattaatatagtgaggataaggatttatattctcaagattatgttctaaaattaatattccattttcgttgctagtttccttaaatccagctaatcggtacgtaacaaacatcatacggttacggtcagtctgtcgaaactcagccaaaaagcgtttacctgcctgttttgtcctttccattagatatgtgaggagtatagtaccaacgccacgggacattacacgacaagacatgagaagaagttttaggcagtcggcttcctccgtcctttttacaagtgttaaaccaatcttcccataggagccatatttgtctgataactcacaaactaataataaataatctggatgattacgataatagtttaattcatcataatcataggtaataccagtcgaatttaattgattcgtacgtactgttaactcctctgcacgctgcaaatcttcctcacgagcctcactaatcacaaaattcatcccaagtgaagctaaaaattcttcttttgggccttcatattcttcttcatccttcgttctcttaagattttctaaatacatcagtcttcgacgacctgaatcttctgtaattctttttggttgtagtcgtggcaagtctaataacgacttatattcattcacatgtatacacagaatatcattatgaacactctgtacttcttctaattcaaaaggttggtcatcaatgaacgcaaaagtatcaatacctatgtttaaattttttctaattttctcaatggaactagatttagagttccaatgaatctccggatataaaaaatactcttctattccaaattcccgtaatttagctattgcatcttcgtagttatttttactagcaactgattgcagtattccacgtcgatctaattcacatataatttcataaattccaggttttaaagtaactgtaccactctctaataaaacaccatcccaaattgtacaatctaagtcccaaacaacacatttaatttccttactcatgataatgcctcctttgttttattcattttcacagttcccatctccatcactataagcttatctgccaaatgaaaatattgatcgtcgtgagtaatagcaataatacatttaccctttgctcgcatttgaggtaacaattcttcataaaagaagcgtctataaccaggatcttgatccgctgcccattcatcaaataaaagtataggtcgatcttccaaatacgtaaccagcaatgccaaccttttcttttgtccagttgatagttgcgtagtagtaaagcgcccattctcaatgccaaccttgtcactcagttggagaagttctaaataatgatcgatttctgctttcattccttctgtattaattccatatagcctatcaaaaacatgaaaatcactcaggatagctgaatagtattgattcaattcctctggagctatttcttttccatttaataaaatgttaccttcattaggttcatataacccagtaatcagttttgataaagtagattttccactcccattaccaccagcaataaagactatttctccagaattaaactccatgtctattggaccaataccaaaaccagtaaaatctccatctttattcttatacttataacttacattttgtagctgcaaacaaattggcacatctaagtactcttttgttgtcgcgatttgctcatttgcctttatatgatctacactcttcaccatttgttgaatacgttgccaagaaatacgtacatttacgagctgagggataccgcccagtatttcattaactggacctgtcatatacagaaaaacgattacatagttacttatcgtctctttcggcatattaacaaaaatttctggaaatacgaaaactacaataccaataacaaaaatgaataatagttctcccagaacaaacacatttgcaaatttaatatctcctatcgttcgtttaacacgatagttattacagctttcattcataacttctcgaaaatcgtttcgttttccagtatgaagcctaagctctttgaaaccatgccttagatcaccaatcaaacgaaaatatacattctgaatatctcttgtttcattccaaactttatctgcttgtcgtccgatcaaagaatatacccctgcagtaataaagatgatacacaaggatagtaaaaaggcatacatattcattacaccaagatagagaaaacaaaatagtaacgttaataaacttgttccagcagtaactaatagattgagagaacgagagataacttccgtatcgttatttaatgtcgcctctattcggcccttctcaatcaactccaatttgtaataaggagtctgtaacaacttatctgttaattccatccttttttcataaactagctcgtttgtatacgatacaatgctagttctaataatacgttgtgaaaagacatacataacgattccaagtacaaagtaaaacaacaagccattttccaaattatttgatctaacaaacgtttcattaatcacaaaaatgagaaaggcattaccaaatcctgatattaatcccaaaacaattaaagtcaaaagcgactttcccttttgtcttggaaaacaaagatttaagaatgtatggataacataggccaaacccaccccagcaattgcatatattgcaagtacaacagttgaaggagcccaaacttttataaatgcccacggaagccctccaaacaagagatttggtagttgataaagtgcataaatcattagcccatatatcgcaacaactaataccatatgtaaccatgtttttcccgttggtaatataaactttctttttctaaaaataatctccctgattaaatgaaataacatgaccaataacgttagtaaacacaaagatgagatcacaaataaggctgttcctatttgatccgttttcttatattcatcatagagtaacggtttaacttctttatctatcatcatatttaaaagactgctaccgatatagtaagtgtaattactattcagattcgctaatactacgacccctatctgttcctcatcacggaaaccaatatacgatgaataatttgggttacttccaccatgtgaaatttcccctccaccactttgatagacctcccatccagctgcatatgaagctccattgctatctggggcaacctttctattcgctttatgagaatcgttaatcaattcctccggaaacatcctaggcttttcaaccccaagctgtaattttaaccatctttccatatcatttatatttgaaataaaatatccagccggtgtattccccctataattaggagcgtcatagggtaatgattgtaagaaattacgcttgtaaccttgggccatgttatctaatggggccatctcacgtccagcgtatgtactcaataaatccaactttgatagcacatgatcttgaacatatctttcaaatgattgattagttgccttctcgattactaatcctaatagatcgtagttaaccgtagaatattcaaaactgctacccggctctcggtttagtcctattggcataacattcctaatcgttttctcaatagaatctttgccattggttataggaatatatccaatggccttttccggtattccactagtatggtgtaataagtcataaagtgtaatttcataaggtttgcctttatactccatttcaaaccatgaaacatatttagttaaagaatcactaagtttaattttcccttctttttctagctgcaatacagctaatgccgtaaaagcttttgaagtagaacctagctcgaaaagcgtctcattcgtaacttgacgtttattgtctatatcggcataaccataattcttcttataaatcgtttcgtttccttttacaattactactgaaagtccaggaatacccgcttgagatatttgttcttctatatgcttctgtattttcttctcattaaactgtaccgtttcctgcgcttccacctgtcgataagggagtactattaaagtcattaaaatgataaacttcaaccatatgtttaacttcatatttttagccctcttttagttaacttggattaacttttcaattttctttttaaatggttgcacaacattttgaccaatacgttcaatttcatgctcactaatctgagaagtaataagaaaataatttgcccctatttcccaaaaatcagttaatgtcgagatgacttcctcatagctaccaactatagaaattgaattagatgggttaactaaacttagacctccccaaagatgatcatctatccacatactatcttttgtaattaaatctttgtatcggcgaagtccaacagaatctgcattatctaaaaatagcttagtcatcctctttaaggctgctggtgttctctcaagtaattcatatgcttctttatatgcttcttccgaagtctcacgagcaatgatgtctactaaaatagcacctggaattttctcgcgcccatattgcttagcgtaattattaactgtttgatagtgttctctaagacttttgcggtctgttgcataaagtatataagcatcaccatactctgcagctactctcattgcctcctcggaggaccccgctacaaagtagcgggcacttcgagagagatcttcctttggataaatatcactattttctacttgataaaactcacctttatagctagttactcctcgtcttaattgttgtaacagctcaatatattcttttgtcctagcatatcgaacatggtgcggttctggtaatccatcacgcgcaaggacaagcgaggcacttccagttacaatgttaatatctgcacgattaccaattaaactatttaaagtattcaatgcttttgctgttacggtaggaagcatctggtttgtattttgcgcaaccaaaatctttacaaactccgtattcattccaatcatagacgctgctatcattggatcaacagatgttggtgcaatggaaaccaataccgagtcaaagttattcttctcagctcttttagcttgattaacatattcctctagaagttcttttgtttgtggtgttggaataacaggtaatccccagcaaaactcaacttttgacggaactacttctttattaatcatgttgttcccctccctttactactttctactttttaaagcagataatgtatttttcataaccgatttcgctttcaataactcttttttatttgttaaattgttatttacttcttgattacttaaatatttagcaagagatttaattgacgtatgctcataaagaacaactataggtaagtctcgtttaaaggcctcttttaatttcacattaatacgaacaagatctaaagaactcattcctagatcgaagaaattatcgtaaattcctatttcttcgattccaaacatatcttttaataattcgtataattgttgttcaatttcattagttggtggtctatacgttgtggaaacatctgaacgattctgctttaatctattcttacttcctttttccaatagttcattataatagttggcaccatttaaaagtttccaatgtaaatctattggagaaaccacgacttgttgttgatttctattgatgatactacggaatacttttaaaccctcttctacagttacaccatcatgtaatacactttccatatccatattaaattgctttgcccatattttagccgacttaagtgacatacccacctcttgccaatctggccaattaatagctacagtgaacactccatcatgagcccgcttataaaacgcaaatgcatctaaaaattcattcgctgcattataaccactctgaccaaatttcatatgatacgccacattaccaattgatgaacataatacgaagaaatcaattggttcatcttttaataaagcatcgagtactagtgtacctttaattttcggagctaaaattttattattagattctttttcacgattcatcataatacctagataatcagcgacacctgctgcatgaattacgccattaatagaaccaaaacgagatttagccttttcaattgcctgtttcatatcatcttgattggaaacatcagaacttaggatcatgtattctgcaccttgagactccattgtcaacaaatcagaaataactcggcttacacgctcgtctttattttctaagtactgttcccattgattacgtggtgggaactctgagcggccaatcaatataagtttgacatttggtactctattagctaaatcttttgcaatttcaaatccaattccaccaagtccaccagtaattaaataaacgccaccctctcgtaatctatcaatttctacatcttcttcctcaaaaggactttgaataatcgtttgcgcccatcgatgacgtcctcgataagctacaactatatcagtagaatccacaaaactctccattaaacccgcttcttcaaacatttgttgagaatctgtatccatatcaatggtacgacattttatattttgaaactcaagattgcatatttttgaaaagcctagaattgtagcttgctctggctttaagttcagctctgtacctgtaacttcaaacatacggtcagtaaaaatgtttaactgtaatgcgccctcataattaattttcccaattgcttgtgcaatataaagtaacgaataatatccttcatccattgatcgttcaattctctcttgatcgagaataacatcattaactggattaaagctccaagcatgtataatcttatttggtaataaatctttttgttctaattctgaaaatagcatttcataatgcattttttgagatggacatatcgtatataaaccgtcggatttttcagagaaaataccacctgttttaacttcaattacatcatgaccttctctttttaatttttctatcagtcgattgaatcgatttagatgatcattgaaaataagccatttatatttttgttctttctttatttgtatagattttaatgttttgcgttcccaagaaggcaaataaaaccagtctttaatattagcctgtttattatggcctcttgtttcctgagttaaactctgagattgagtattaaaaaatggatcagctttaaatcgttttttcatgaaaggatacgttggtaaatctaataaccttttattctcactgttattaaaagtattccaatttatagttccaccttgcatccataaccgtcccatttgcttgcataaatgctcgaagtcatttgatttatccagaggatgacgtaacatgtttaaagccaattgatctttacttctatttaaatgttttaatacaaaagttgataatgcattacctgggccaatctcaaggcaaattacattttttaaatgaaaaatttcagataatccctttgaaaattgaacagtacttcgtagatgctgtgcccaataagaaggtgatgtggcttcatttgctgtaatcatttcacctgtaacattagatatataaggtattttaggacttgataattttatatttcctacagcttgctcaaatgcatctagaacttcatccatcattcgagaatggaaagcatgcgaagtaaatagacgcgttgtctttactccatgatttaaaagtaattcctcaatcttattgattgaaagtacagtaccagaaattactgaatgttgagaggaatttacagctgctatatctacatcatctgttatataggtttgtaattcatcaacagataaatttacacttagcatagcgccttctgatacgctattcattaacttccctctaatcattactaaatgtaatgcatcttcataagacattacttctgctaaacaagctgctacaaactcaccaatactatggccaaacatgacccttggataaactccccaattcattagaagcttggctaatgcatattcaatagtgaatagtagaggttgcgtcattgaagttctatttaactgttcagttgctttatcctctgtctcctttgtaggatacaaaatatttttcatgtctatatctaaccaatttgagagtaaggctaaaccttgatcaacgtgttcacgaaatacaggttcattttcatataaatctctacccatattgatatactgtgatccttgccctgaaaaaagaaaggctaaaggtctactctccattgcgtttgttttctctagtcccgtatcaccaagtttttctatggcatcctctattccattaacaactacagcagttctgtatggaaattcacgacgacctttttgtaatgtataagctgtatcagatagtgatatctctcgattccccttcaaatgcaataatagatcgttagtagctttatctaaggattcctctgtttttgctgaaacagttaataagttccaagattgtttttcaaaattcttagcattgtcaggaacagactctaacactatatgtgcattagttccacccatcccaaacgaactaacacccgctcttcttacctctcctttccatgggataagttccgtatttacacgaaacggattttttccaaaatcaatgctagggtttgggttattataatgaaggctcggcggaattttcttgtttttcaaagctaagaccgtctttataaatcctccaactcctgctgcagcatctaaatgtccaatgttcgtcttcactgatccaattaaaattctacctggttcttgcttaccaaaagctaacttcaatgcttctacttctataggatcacctagttgcgtaccagtaccatgagtttctatatatgagatttcttcaggcttaacgccagctatttcatgagccgattttataacagcagcttgtccatcaacccctggcgctgtaaatccagccttattggacccatcattgtttactgcagcccccttaataactccatgtattaaattcccatctcgaagagcgtcctccaaccttttcagtactacaataccagcaccatttccacccactgttccttgagcatccttatcaaaagctcgacaatgaccatctggtgagaaaatcataccatcttcatataaatatcctgtttttgttggataagttatacttactcccccggccagagctatatcgcatcgtccatcaataagatctgcccatgcgttttgaatagcaactaaggaggtagaacaagctgtttgtactgtaaccgctggtccttttagatttaatttataagccaatcgagtagcaaagaaatctttttcgtttaacaacattgcttggaaatcttctaatgtattagaagattcactggcaatagaacgaagccagtggaaatttggtgatcctccaacataaactcctgtattcatatgagaagaattaacctcacctgcttgttctagtgcttcccatgcgcattcatgaagtattcgcagttgtggatccatcatttcagcttcttttagactgtaatcaaaaaattcattatcgaatgcatctacatcttctaaataccctttagattttatataattaggtttttgaatcacttcttttggtatgcccatctcactaagttcttcatctgtaaatgtacgaatggattctatcccttgttctaaatttgaccagaattgcttaagattagaagcgcctggcatacgaaccgccataccaaccactgctacatcatttttattcatagataaaaaattttctttcttaacttcttcaggttggtgttccatagcattatcacttctaaagtaggaagcttgatcatgaaccgttgggtatcggaataacataggcattgtaagttctttttcaaacttgcttcgtaaacgagagaacaatcgaaccatttttaaggagttccctccaacatcaaagaaattatcatacaaccctactttttctacccccaaaacttccttccaaacatcagctaccgttgtttcaagctcatctagtaaatcatttggttgtactaacttagtaggcttaggtaaagcacgacgattaacttttccattcgtagttaatggcatttcacttaaaagtacaaaatacataggtatcatatacgaaggtattttgtcagtaagataataacgtaattcattttgagatatatcttgatcagttagtatataagcacacagttcttgttcctctccaaaagcaatagataaaactaccgcttccttcacatccgcatgctgttgtaaatgatgttctatttctcctgtttcaattcgataaccacgtatcttcacttgatgatcactacgacctatatactccatttcgccattttcaagaatacggactaaatctcctgatctatataatctttcacttggattataaggattctgtataaaacgttcactgtttagttcaggacgatttagatatccccgcgcaactccatatcctccaacataaagttccccttgcattcccttaggtgtaggattcatatgtttgtcaaatacatagcacgaatacgtaggaagaggcacgcctatagcactaagattactgtgcatttctttttctccaatttccttataagtaacatgtactgtcgtctcagttattccatacatatttactatgaccgtattaggtgaacgcttaaaccaactttgcagtaaacctggcttcagcatttctcctccaaatgtaagtaacctaattctgaaagaaagtttaggcatttcttcaactacttgctgaaaaacatagaatgcagatggtgtttgattaaatatcgttactccctcatctgcaaccaactgagcaagtttatacgtatcacggattgttttttttgttgccaggacaagacgtccaccataagtaagggatccaaatatctcccaaactgacatatcaaaacagaaagaatgaaacagtaaccacacatcattactagaaaatttaaaactatttggttgatgcataacaagttgtattacatttcgatgttcaatcataacccctttaggacgtcctgttgttccagaagtataaatgacatatgctaaattggttggggcaacatctactctctcgaaatcttgcataggtgtctcattgagttcttcaataaaaagcattgtgctatcaaatttaactttatcctcaaataaatttgaggttattattacatttgaaccactatcttgaagaataaaatcaattcgttcctgaggataatcaggatcaattggaacataggccccacctgcttttaaaataccaagtagagagataatcatattaaatgagtaatccaacattacagctactggagaatctaaagttacaccttcttttagaagagcaaatgccactttatccgcacgctcattcaactctccataagtcatctcactattctcaaatgtaagtgccactctctcaggatgcttttcagcttgcatctcaattaattgatgaagtgttgtgtgtgggaatgtagcactttgattttgaccaccttgaagcaaaaacttttcttctgcctcatctaacattttaagagtttgtattggttgtccttcatctaaaagcattgaatctaatagctgtataaaatggttagttatactggtaataatggattcatcaaatacatcttcaggccacatcattgcaagtttaatagaatcgaaacactctattgagacagttaaatcatagttggtcatttcatttacttcataacctgaaattcttacaccttcatcaatttctttcagcttttctatatcaagagggtaattctcaactaccataatagtgtcaaatgacacgtttaaatcaacaattggagtcgtttcatattcagttcttctttggacatcactttgaattatttgtaaaagatctgaaacagtcattctcccatcagcacttacacgaagtggtggtgtatttataaataaacctaccatttcactcagaccatgcattggaattgaacgaccagatactgttgtaccgaatattacgtcctctgaatttttgtatctttgtaataatagaccccaggctgtataaaataatgtagccaatgttacaccttgattacttgcaaaacttcggaatctatcacttcgctctttatctatctcttttacatatgtttttgctttttttagttcattagaattcttattggataaatttatttgttcagttaattcatttaaatattgttcccaaaaaagcttttgttttgatttatcttgtttttgttgccatagtatatattctttaaatttctttttatttatagatgatggtacctctccctttattaactctcgatatacctcaataaactcttgtaaaataataccattactccaaccatcaaacaaaatatgatgatgacgtaaaaccatttcatattcgccttcgttcaaatggcacagttcgatagaaaagggaactgtttgtaaatcaaagctttctgtattattagagactttaccatcactatacataatcttcggagtatgcttttttagtataagttgtacaggttgtttaactttttcccatcgaaaaattgtacgtagcatttcattttcccgcgtcacataattccacgcctcttcaaactttggaatattaatttttccagttaagcaaagtcgaagttcttcatgatatagctttccttcgggttctttcaaataatgataaagaattccttcctgcactggtgtaagggcgattacatcttcaatatcttctttatgaatctttactgctttcctcattaacagaacctcctacaagtgtggtatggtgtgaatatttatcggaacctaataaggcaagtgcttttctatctatctttccgctatccgttaatggcatttcatttacacgtacaaaacggttaggtatcatataatctggtaaaaataagcgaagatatttttttaacctctctaactcaatatcattttctgactcatagaaagctattaacttaactaccatctctgattcttgtcttacaattaccgcacattgtaaaactccttcacaagacattaaacacgattctatttcccctaactcaatacgaagcccattaactttaacttgaaaatcaattcttccatgaaactcaatattcccatccgatcttattaaagctaagtcaccagttttatatatacgggtatcaagggaatattgtacaaacttttctgccgttaattgcggcctatttacatatccacgtgctaatcctatacctgagatacataattctcctatatggccttcaggaagtttattaccatatttatcaacaacaaacatctcaatattcttaattggtcgccctattggaacgctcccttctgtaatctcatgtgtcggacaatcataagcagtcacatcaatggttgcttcagtaggtccgtacagattagtaagaagtgtaccattagagaaatttagcaacttattaaaacggtttacatgttgagacagtagtgcctcaccactaacaaatacttgtttcaacgattttattcggttagtttcacctgtcacatcaagatagtgtaaaaatgcacttaacatagatggtacaaaatgcataattgtcacgtcattactttcagttgtctcaataatagcctgtggaaacttctccatccccggcgcaagaatacatactttggctccaactatggcccaccagaacatctcccatacggatacatcaaatgtataaggggtcttttgtaatatagtatcctttgaactaattggataagcctcttgcatccactcaattcgatttattaaggccgaatgctcaatcataacacccttaggtttcccggttgaaccggaagtgtatattacgtacacaagatcagagggtttgttaatacactctagattttcactctttccttcataggaaatcgaatctaaagccaacatatcagccttcaaactatcttgaaaacgatgtaggatttgcttttgcgtcagtattaatttagcaccgctatcttctataatgaattgtaatcgtgatgatggatggttcggggaaagcggcagatatgctccgcccgcttttaatatcccgaaaattccgacaaccatttcgatagatcgctctaccataatacctacaactgtatctgaaccaactccaccttcacgtaaaagacgagctaattggttacttttttcatttaattccttataggttaatgtttcttttttaaagataacagcaacctcatctggcgtacggactacttgttcttcaaacagcttttgtatacatgtactcatccgggttgtatcactcctttagttacaggtattttttcaatggcacgtttcgcttttttagcaaatcccttaccaagtaatagctgatgaatctgattactcccctcaacgatctccattgttttagaatctctaaagcaccttgatattgaataattatcattacaaccaagtgctcccataatctgtacagcattcgttgaatgccttgtacctgagcgcgatgcaaaatattttgcaatcataatcttttcagtagcatcagctcgatgctcatttttggccttacaagcttctaaactaagtagtatagaagcttctaaatctactcccatatccgtaatcatatgtgaaatcatgccatgatcaattagagagttaccaaatgcacttctatgcaatacatgattcccacatatttccaaacaagtacgtaatacaccaagagcagcaaaggcaattgaaatacgcccaaattctaaagcatacggtgcaaggtaagtaaaagcaaatcctggtctaccaatgatattttctaaaggtatttctacattattgaattcaatttctgccaaatatgcagctttaaatccaagcatgtctcttatatgagtaacatttacacccgcactatcttttggtactaaacaggcaactggttgttcaccatttagctttccaaataccaaaaacacatcagcagctgcaccaaaagtgatccacttcttcactccattaagaattaatttatccccgtgttgatcgaagttcgttttaatcatatttaaatctgatcctgctccaggttcagtaagagctaatgcagctatttgattaccagatgcaagtaatggtaaccactgatttttttgattttctgttccccattttaaaatcgtttctgttaccatcgtatggacattaaataatcccgaaagagagacactacctcttgctattgcttcagtaaataacccatacgttacataatcccactctaatccaccatactccgctggaagtgttccacctaaataaccatttttagcacaagtctttattatgtctgatggaatgccctgttcaatctcccaactattagcgtaaggttctatattttcataaacaaaatccaaaaaattctgatacattttatattgagatggctctaagtattgtttcatgtccattaccgaaccatttgcttatttcttataaaattaccaatagaatttacagacttatagttatccatatctaagtcatccatagttacctttatggcaaattctttttcaagaaaagtcatcaattggattgcaaataaagaattaactaatccttcttcaaaaatctcagtatcatcattaaattcaatacctacatgatcttgaatatacatatgaataattttttctaaatttttatcttgcattttatacacccctatttgtaatttttaattttaataagcgtaaaaacctttaccactctttctaccacattcacctgcatccaccatctttttaagtaatggacaacatctaaactttggatcttgatattcctcataaagtacattcaaagaatgtaatactgtatctaacccaattaaatctgctgtttctaatggacccattgtatgtccaaagcattttttaaatatatcgtctacctgtttaggcgttgctacaccatccattacaacccaagccgattcattcatgaataagtgggagatacggttagaaacaaacccagtctgatcattaaccacaattgcatctttatctaattgtttgaggaaagattgagctttttcgaccgtttcatctgaagttaaataccctctaataacttctatagatggtttcatatataccggattcataaaatgcattcctattattttatctggacgctttgttactcctcctacttttgttattgagatacaagacgtattgactccaaaaattgtatcctttttacatatctcatctaatcttctatagatcggctctttaatttgccagttttctggaacattttctactatataatcacattcagccacttcatcaagattagtagagctacttattaacgaaagtacttcttccttatgcattctaggaaatgctttattaattagaggagcaaagcgaactgtctctaatattttctcttccgctatttctaactgctcttctgtaacatcaattaataccgtttctagaccatgcagcactaaatctactgccatgccgatccccattgttccagcacctacaataccaattttcttgaacatttatccatcatcgctcccttaatatatttataatttatatctaaaaacttttacattgaagaactctttgcaggtaacgtttttgttctctctctttaatctgtttttcagtaagtgctgttttcatcatttggattgcttcttctacatcacttttctccactgaataccccgaattaattttttcttccaattgactttggaccttttgaaatgggagtactacctttttctgataatcacttaaatctgtattataattttttgtacttacaactacagttaaacaccctgatataacttcttcataatcagattcttgtaatgtaaaagaattttttgtatttaggatatctttctccctttcataattaaatgtcgatatagcagggttaatagcttgcagaagatacttcaagacttcctttggtcccatttcaatagctttcatagacccttgattcattagatagtgaatcatgtccaaccatttcacaggctttattaattgtaagtaaaggttttctcttatattttctacacctttatacattgaactatcatgattcgctatgacaggtactaatggctgtttcatatctatattttctagtacactcttatatttttcagcagcaggttgcatcataggagaatgaaatggcccacttaatttaagggggattgcaattcccccatgctctactaccatttcacaagctaactgaaccgcagagtttgtaccagaaattgatgttttatttggagtgtcataagccgatatatatacttcctgtcccttggttaacaattctgaacaaataccttcaacaatttctggagcaagattgttaacccatgccatagttccatctatagtcaatgcatagctactcaaaatcgtactacgttcttgtactaattttaaggtatctgaaaatgcaattgctccagaagcacatagagctgtatattctcccaaagaatatccaatcattgcctctggtttattgcctatttcctgttcaaaaactcgaaaagctgccatgctagttgttactaaagcagtctgtgaattttgtaacttttcaaggtcagctttgtatatcttctccatacaaagggaagccatgtctatttttagagtgtcacttgcttcttcaaatatctcacgtgctacagggaagttttcataaaggtacttacccattccagaataatgggatcctacgccaggaaacataaatacaatattcatctttttatctccctttttttcatcttaagctatcttcaactctatctaataaagctcgtccctcttcagtttttcttaaattcactaaatcaactacatagcgaatatctgatacatcattccatcctaaatccagtgcaagattcatatgctttaacgaaagatcgattctatcaattaatgaataaccacatgaaagtaaaaagtgatgccatgcatttaaatctcctacagtacgagctttttgtacaaactcactagctttattaaaatctgaatagtatcttagttgatggtatgcggtaaaaacgaaattatctaattcgttataaggaaacacataagctgtataggtttgaagatttgtgaatccaacttttcccgctagtttaatagatggaatacgaaaatcctctgtcttccaatgtggtgttcttccttgttttaaacagtcatccaagaatgctcttgcagccaaccaagcataccctttacctcgctggaataaatcataagtattaattccaatttccacatcagtatctgttgcaaaaaccgataagcaactagttacaacttgttcatgtaccattactacataaccaaatccatttcggatgaaatcctgagttgactcccaaaaatcaacaatatcatcccgtaccattgcgaactttttatctgatagcatgtcgattgtaatgcgttccaccgttacctcatcaggcatattaggtttagataacttattataagactccggatcaaaagtaaatgttactcgagtgtaaggtttaggaataaacatttgcaattgttcctcgacaacctgtttccattttgattcgggtaataattcaacctgaaaaaagtcatcccctatctgctgagcctcaggtgcaattacttctttaataaaagttggtagacttgaaacaaaattacttgtaggatcacctaataaataaaaaatttcttgttctgcccatacaagtgcacatctagggttattaggattatccacataaatatgtcccttattgtaaccatgaactataccattcagtattggatggttcttataatcaacgagaagtggagatatttgtttgaattcatccttttcttttaccaattcataaatcatattcttaaaagtcctcccttttgagaacaagtgtgaagtgcatgctgcgcaataattggctgaagtacctgcgaggtaccttcaataatttctaaaacctttgcttccctaaataaacgctcaacaggatattctcttgaaaacccgtttccaccaaacacttggacagcgtttgtggctaccttcatagccatctttgaggcaaaatattttgcaatggttgtttcaattacagcatcagtatgtctatcctgacgctttttcccagcctcttggcataacgaacgagctgcttttatatttacacttgcttctgctaaaattgtttgaattgcttcatattcacatatatatttatttccttgttttcttcttcttgaataagctaccattgcttctagtgcttcttgagcaatggctactcccgcccaggcaatactatatctaccatgatcaagagctgtgttaactacataactccatccacccccaattggtcctaacaaattttcagctggtacctttacatcttgcaaatgaatctcagctatatgcgaggaattacttgctaacagtttactcattttatttgtagaaacacccgtcattgaccgttcaacaataaaagcgctaacttttccctcactagacgcaaaaactaaaaaacaatccgcaatgtcagcaaaagaaatccattttttgtgcccattaagaataaaatgatcattaacttgtttataggaagttccaacagcttttgcatcagaaccaacctctggctcagttagggcaaatgaaaataataggttcccctttgccatctcaggtaaccattttctcttttgctcttcagtcccccaccttttaattgactcccctactaaagattcatgaactgtaagtaattcacgaaccgaattacaagctttaccaatgatttcagtaagacgaccataatctaaagaatcaagagaaagcccaccatattcttttggtatcgttgcacccaatacaccataacttgagatttcttgtatcacatcatagggaagctcttcattactttcaaactcacttgctcgaggccgaagcttcttttccgcaaactcatcaactactcccagaatctcttctgcattactcatactgtgaaattcccattcttctttttgttaattagatcaaccatattattaatagtagaaaagttaataatatcaagttcatcattatctactactatatcaaactccgtttctatgaaatttaacatttgcatagcaaagagcgaatttacataacctttttcaaatatgttgtcatcattagcaacaatagtttcctctgcattaaaaataataagattttttttaatgtattgacgtattttttcatgattatccatgtaattactccttctgagacctgggaaatcaattaacctatatcccaattaaaatcagtctctatttttattttttctttctcctgagtcgcagataaaacaagttctttttcctcacttgttaacatttgaatatcttttagactaacattaggatgagttgttatttcttctaatagaaggttaaatcgccgtccaaattctactattgttgatttatcaaataaagatgtagcatattcaaaagtgaattcatatatatctttattttcttcagcaataagagttaaatcaaacttacttgttagtgtatctgtgtttgtttccgtgctaatttctaatccatccacaactgtatgtttttcatccgaattttgtaatacaaacatgacatcaaataaagcacttcggcttaagtctctagaaagatctaatttttccactaactgatcaaatggatacacctgatgttcgaaagcttctaacgtatcgtttttcacttttttcaagtgattaataaaagattgatctggatttatttgataacgtaatgcaattgtatttacaaacagccccataagaggtaacagatcagcatgcggcctacctgcaactggtgatcctataatgacatccttttgttccccatgcttgtacagaaaaatagtgaaggtagccataagtaacataaaaggtgtcgtatcagtttctagtgctattttttttattttccgagtaatttccttgtttacttggaaattatattgttcaccctcaaaactctttacaggtggccgacctcgatcatatggtaattcaagaactggtatatcccctgagaataattcttcccagtatttctcatggatatcaaattctttagaagataataatttttgttcccacacagcataatctttatattgcaaacgattttccggcaatgtttccccagcatataaggccttaaaatcatgcataaagatacttaaagacacgccatctgttatgatgtgatgaaggtcaattacaagtaaataactattatcttttagctcctttagtccagcccgcattaacggaaccttagaaagattaaatggttgcaaccattctttataatctccctttatcatttctagctcaaatgttacctgttctaatactctctgtactaattgatccccctgccactcaaactgtgttctgagtatttcatggcgtttaataagcttttcaaagactaattctatccttttccgatccaccgttcctttaagaataaaacaacttggtacattgtatgtcatctgtaccccatccatctcttgtagtaacatcattcttttttgagtcgatgaaaccgggtatacctcagattccggtactatttctatctcttgcaacctattttcttttgaatttttaataaaatgacttaaagttcttattgttggatactcaaaaagatttgctaatgataattgcacattaaattctttccatattttagcgttgattacagtagcatgaagggaatgaccaccaagtgcgaaaaaattatcttccacaccaatacaaggattacctataacttctttccatatatcaactagctttctctccatattatcgagtggttttacataattagtagtctcttctatcgatggcgaagaatctatgattacattctttgtattaccttttataacagaaacaagaaatgtcattatttgttcagctaaattttgctcgtattctgcagcatggtgaattttatctgaaatgtttactattccttctttagttactgattttgttaagtgcatttttatcaatgatccacgaattactccccaattagcagctgctgtcttcatagattcagcgatagtttggaagtccgagtgataacgctcaccaagaaacgaaagcatttttgaaaacttcactcggccatctacaacttgacctaaatgtgagaataacggaacatcattaaagtctaaatatccatctgtctctttatttaaatcaaacctacttattagtttcgtagcaaaaaggtgcatttgtgaaaaaatatgtttttcatcttttatatgttttatccaatttgacaaatcggttgtaattgattgtatgtctgtgatttcatcttcagtaacttttaaagtacttactttttgataacccttatgaaaaagttctgttgaaagttgtgcatttttaaccataaaatatggatcggtaataatgaaacagtcttcttcgggctcatatcctacaataacaaatgaatgaacaatatgattttttagataattctcatcccaaggaagccagtatgcattcatggttaccaccacaggaaatcccgagtataattgttctaatataatttcaaatccttcatcggatgaatctgtatcaaatatagtactttttataccatgatatttttctaaatcacttacaaaataaccagactctgtatataaaccatcccctagatttccattatcgacaggagaaaaaccaaaatcccataatctagcgtacattaaataatgtttacgcttaaaccaattagctaacgtagcaattacatcatcaatacaattctgttcagaacttttacaaggctcaacatcatataagattgaagaagtataatttcccatttactcacctctatatttttaccaacaggaaaaactattgtaatttggttatttctctatactaagttgacagagatatgtatatcttctttaaaaatctatcaattattattaacgcatttcatataaagaatcttatttctcgaatcacttttttattttaatcattctataataaggaggagaattccctaactcatagtcaccagaataaacactaacattccagaaagctaagagggaaagctcctttaatcccacagtatagcaagtgtaaatttaaactcttaaaagtcgtgtttacaatatgaagtaatactaattatttttcttttctgctatataagcagctagttgtttaatattgcgttttgtatatgcgactaagtcgtccgtattaagattctcgttttctaaagcaagatcaagctcaatagctagtagagaatttcctcctaagtcaaagaaatcatcctctacaccgacagcttcaatcttcaatatacttttccatatttcaaccaaacgagattctaactcattactaggagacatcatactctcctcctcattcttaggtaaagatctaggtgaaggtaaggaatgtcgatcaacctttccacttggtgttaatggtatgttttcaacttcaacaaagaaagtaggtatcatataactcggaactaatttagcaagatgcaatttcaaatcagaaatggatacaggtgattttgctacgaaataagctacaagttttttctgcccatcttcatcttgaatgtctactatcactgcttctttaattgcatgatgtgaagataaagcatctaaaatttcccctggctcaattcgatatcctctaatttttaattgttcatcatttctaccgaggaattctatattcccatcaggtaaccagcgtgaaagatctcctgtcctgtacattttctccccttttacaaatgggtctggtaaaaacttttcttcagttaatctcatttgatttacatatcctcttgcaagcccttctcccgcaatatacagctctcctaccgcgccaataggctgaagtctctgtttttgattaagtatataaagccttacattcggaataggctttccaataggaatagtattatagttttcactttcttgaagtgaaaacgtacttgcgataactgtcgcctcagtaggaccatacatattttctatttgagtcgatagtcgatgctttttaaacttattaaccacctcatgtgtcaaagcttcacccgcaagtaatatatacttcactttatttaaaacctggcaattttcattattaagtgtatttacgaaagctctaaacatagacggtacaaaatttaataatttcacatcatatttatctatagttcttaaaattgctcttgggtttcgatgttccccattgtccattattactaatttactacctactatggtccacccaaacaactctagaacagatacatcaaatatataaggtgtctttagtaaatacgtatctgattcatccataggatataaatgagacattgaaaataagaaattcacaatactacaatgttcaatcatgactccttttggtctacctgtagaaccggaggtgtataaaatataagctaagttatttgattttccagcaacttccaggttgcttgtatcaccaacgtacaaattttcttgctttaaatcaataatctctcctacaaatggaatttcacctacgtatttagattctgtaagtacaaattgaggattacaatcctctaaaatatgttccattcgacgctttggatattcaggatcaattggtacatatgcagctccagattttagcgcagcaaatatagctataatcatttctacggatctttccacaacgataccaattttagtttcctgatctacacctttttgtctaagaatacgagcaagctgatttgctcgattattgatatacgaataactgtacggtatatcatttgaaataactgcgatttcttctggtttattttcaacctgatcctcaaaaaattgatgaactaatttaccctgagtaaaatctaattttgtattattaagttcatttaacatccttgtggattcacttttacttaaaacattaacgtcttcaattttcgcttcaggattagctaccatccactctagcgtatttataaaatgcatcataaaccgctctatagtttgcggataatatagtcctgtcgcgtattccaattctaatcgcagaccctcttcttccggaaatacttctatactcatatctacctttgaagcttgatgcttaatttcgtatgatttaaatgtaatatcttttattttttctgatgttcttccgatattctgcattactaacatgacatcaaatacaggatttcgattagtatgataagccatgtctaacttatttactaactcatcaaatgggtattcttgatattgaaatgcttctagcgcattttcttttacttcatttaagaattgaattatcgtcttttccgctttaggatgatttctcataggtagagtatttacaaacatacctatgataggctcaagatcatgatgaattcttcctgcaattggagaacctactataatatcttcctgttgcgtatacacatgcaatactatatttagtgacgaaagaagtaccatatataaagtagcttctctttcatccgcaaaggattttaatttattagaaagttcaggtgttaaatggaatactaatctatcaccttcaaaagtttgatttagcccacgtggcttatcggttgggaacataagaattggtaactcacctttaaacttctctacccaatactcttcaatttctttcagcccttcatcatgtaaacggttggtttgccaattggcataatctttgtattgtattttaataggctctaaggctttgcctgaatataaatctataaactctttttctaacttcgctaaagatactccatctgctattatgtgatgaagatcaaatagtaacagatattgattgaattctaatttcattaaaccgacgcgcataagtggagccctatctaactgaaaaggacgaacaaattcctgtattagctcttcaattgttgatctatcagatttatataaatgttcaattctaatatctaaactatcatgaataaattgaactggttcacctttaataaattggaatgaagttcttaatgattcatgacgttctactaattctttgacacattgttctgcctttataaaatcaaactcaccttctattaacattgcacctggtatattgtaggcagttcctattccagcaaagcggtttaatatatataatcttttttgtgaagaagaagtttgataaaattctctatcaggtacgatctcaatttgagaataatttttcttcccttcatatttctctatatactccgctaatagcataattgtaggcctttgaaacatttcacgtataggtacatctacacctaaacgtttatatatgtgtgaaacaacagaagtaatttgtaatgaattacctcctaattcgaaaaagttatcattcacacctattttctctattccaattactactttccatatctcagagagcatttgttcaatttcattacgtggttcaataaataaagctgtggattgctcccaaattggatctggaagagctttccgatctattttaccgtttgatgagattggaaactgctcaatcgggatgatgtatgcaggaatcatataaaaaggtaaatactctctaaggaattggcgtacctcttctactttagctgaagaattcataacaacatatgcacataaaaccggagcatcttctccctcttttttacgtgtaattacaatagcttcaccaatttcaggatatcgtaatagttgcttttctatttctcctaattcaattcgtaatccacgaattttgacttgatcatccatacggcctaaatattcaagatttccatctggtaaccagcgagccaagtctccagtacgatataccttgtcatctataatagaagaacctgttttggtgatttgtataggaacaaatttgtccatagttaacttaggttgatttaaataccctcttgctagcccttctcctgaaatacacaactctccaggaattccaacgggttgtaattgttgattatcacccataatataaactttttgattggctagaggtcgtcctattggtaattgattcataagttctaacttatcgtgctgaacatgataacatgtagaatctacagtagtctccgtaggtccataagcatttgttaaattaggttggcagttcttattaaataaaccaaggaatttccgcgctaatttcggtggtaattcctctccagcaataataaaatgtttaaatgaatattctattttttcatctataaaattagttaataatcgaagatgcatcggcgttccatccgcgatatttatttgcttttcttgataaaaattaattagcttctgcccatcagttcttgcttcctctggtactataaataaactatttcctaataaaagcgcaccaaacatgttttgtactgaagcgtcaaactcaaaaggtgaaactaacccgattcgcatagaggaactatatttatcatatatttcattttttaacccgaatattaaatttacaacactacgattttcaatcataattcctttaggattacctgttgttccagaggtaaagataacatatgccaaatcgtaaggtgtacttactgaaggtaaactaaccaattctgtttcaagtagttcattaaaacttaccatactacaatcctggatttcccttgtaaaatcttcactaataacttctggttttactatacaaagtggagatttacattcttttagcattgcctctatccgtttatacggcaaatatatgttaataggtaaataagcagccccactttttaaaatacctagcaatgcaattactgcatcaattgatcgatccatcataaggccaacaatgtgtccttttccaattccttttttatgtagagaactggcaaccagatctaccttttcttttaattgagcgtatgttatttctcttttgtcatcagaaacagcaagtttatttggattatgcatgacttgttcttcaaataactgtatcaccgttaaatgatgcgggtaatctaactcagtttgattaaatgtgattaactctcttatatcattatcactaacccaatctaaatctatatgcggcgtattcggttgtagtaaagcttgctctaacaagtctataaaatgatgaccaaatcgcataacagtagatgttttgtatagatgctcattaaaatacatatcaacttctatacacccatttacttgacggaaagagaatataatctcagcattgctctcacttaaataatttaaatcttgaatttcctctagcaaaattgcagtacggaacggataattacgcccctctggaaggtagttactcaaaaccggttgtaaactttccaatgggaaattttgatgttctaaagcattaaccattactgtactaacatgctggagaatttgtctaaatgtcatatgttcctcaagaccatgtcttaaaactaacaaattattaataaggttagtatcactgtcttgttttaaaacaggtgtaccaatgcatatatcttgcaatctagtatatttatttaacagcaaggtaagtccagcagtaagaatcatgtgcaactgaagatctgatccatttgctaactttaaaatcttctcggacaattcctcttttagttttatgttaacatttgataaattcacctgtttgtttgatgtccggtaatcataagggaaatggcagtcagccagttcccctgataagttttctaaccaaaattctctttcctttattcgttcatttgcggcaattactttatctttatttgctattcgttcaaccatagttactcactcctgacaataatcaattaaaagttaaaatccccaaaatctactgataccttaactggttgcagttcttgaatttcttgtttaaatgaaatatcttttaataaaatttcaggatgatctacaatttgttcaaaaatctcaacataacgctcacataacttttgaaccgtgtccctagtatataaagaggttgcatattccatagtcagttcaattgtatcttccaattcaaccactcttagcaataaatccatttgtgcgcgcttaaagtcgtgatcatatgtccttagttctaaaccatcgataaacatatgatctgcatccatattttgcataacaaatgaaacatcgaaaagtgggttcctattatacgtgccctgaagtcctaatttattaaccaggtcctcatattgacatttttgatgttcaaatgcttgtaagacctgctcttttacttcaaataggaattgagtaaacctttgttcagctcttggatagttccttattcctaacatgtttacaaatactcctataatatcttgtaaatccgcatgcgggcgaccagtaattggtgaaccaataacaacatcctcttggccagtatatttacctagcaaaatattatatacagagagcatcagcgtatataatgtagtttcttcttttgctaataaacgcttaattttcttggtaacatttgaatcaatagtaaaggatattttactacctttcagatctaatatttcaggtcttgtataatcagtaggcatattcaagacaggtacaccatctttaaattgctctagccaatactgttcatgtttgagagcaatttctttttctttttcactttgctgccattctgagtaatccttatactgtatttttaagtttggtaatttctctcctgagtaaagcgcaaatagatctctaacaaaaatatcataggaaactccatcggttactatatgatgtaaatcaataattaaaatatgtttttgttcttccaatctaattaaccctacacggaaatatggagcattattaaaattaaatgggcgaataaattcattaattatttgttccacttcagattcaaagccctcaatttgagtaatatggaaatcagcatgatcatgaataatttgtactggtttatcatttttcatttcaatagtagttctaaatatctcatgacgcttaattaattgagtgaacgccttttctaaacgttcaatgtttaattttccattcaaaagaataacggaagtatcattataagctgtactttctggatacaatcggtgtaatacataaaatctcttctgagctgaagaaagctgataatgagatttaggttcagctggaacaataacatcaaattcactcttatctgcccttgaaatataatttgctagtttctcaatatttgatagagtaaagagctctttaataggaacttcaacattaaactctttatgaatttttgaaacaatagtaatagccttaagtgaatctccacctagttccagaagatcatcatgaacaccaacttctgaaactttaaatatatttctccaaatttttgaaagcttttcttctacctcattgcgaggtgctacatattcagtcaagagttgtggtctagaatggtataacgtagaatctaattcttcttccttctcatcattgaaagaatttaataacacccattgatcaatacgcgcttgcagttctcctggagaatgaatcagtacttccccttgtttccatgacagtgctatattaaaggcctgaactccttcttcaggtgtcatagataattcatgtacacttgcacctatttgcatatctttttcttcatcttcccagtatttccaatcactccaattgacacttatccaaggtagtttggaataacgatttatatattgtgcaaaaacatccatgtatatatttgaagcagcgtatgaaacataacctaatccacctaagaccgctgaaattgaagacattagaacacaaaaatctaagtctttatttcgtaagcactcttctaaattgagaagaccataaatttttgcagaaaattgttcctcacagtcctctttttcaagttcctgaatcaaattaaaagtctttccaccgagaatacctgcaccatgaattacaccattaatctttccaaatttttgttctgccttatgaattgcttcgtatagttgtgattgatctgtaacatcagcagcaagtacataaactttagatcccgtttcttctatctctaaaactttacgaattctgtccgaatacatcgtattttccttcaaatgcatatcccactcatcacgatttggcagacctgtacgtgtaagaagaactaagttggcttgtacagtttgagccaagtgtttcgcaagaattgtaccaatacctccgagtcctcctgtaataaggtaaactccattttttcgtaaaggcagtttctctttagctggctgttctagttgtaaaggctcgtaagtttgaacaaatcttttatttcctcgataagcaatcatcttatcattcgtatttgaaagacattcttctactaattgatttattaacctattcttccattctttgtttagaggtaaaacaacatcaacacttgaacaagaaagataagaatactcttgcggaacaactaatgacgttccaagtacagttgatttttctggaattaattcttcatcaccaatcacttgttgaacaccatttgtaatgattcgaattgagattgaatcagagatattcttgtctcctagtgcctgagttaagtagaacattgaatagaatcctaagttttgtttacaatttacatattcaattgaggcttgtctttcctcattggtaattccccacatatgaattattcttgtaggtaaaccatatatttcttgtacttcatccaataacttaacgtaatctgtacgttcttcaggatttataatgaagcgatcgttattctccttattaaaagcaaagccaggttctactgtaactactctctgccctttatttaataagtccttaactagttcattacctaaaccttcttgatctacaaaaacaatccatgtctcattcacatcatgatttggttcaaacaatgtagaacttttccattgcggcgtatagaaccattcagaaatgttgttattcttactaattttagattgcttactattaagcttttgacctaaatcatacggattaccttgtaatttataagatattttattgaaagaatacattggtaatgggatacgtcttctcttctcatctttataaaattgttcccaatctacagaaatacctgttacccacattcgagtgatgtgactgaataagaaatacatatctgatacatcttgttgaacagatcgaaccgtattaaatattctttcattaccattttcatagtctaaaaggcgactagtaagcctactaaggtcatttccaggaccaatctctatgaatagacttgtattgtccctattcaactcttgaattccatcagagaatcgaacagttccacgcatatgttttacccaataaactgggtttgttgcttcttcaggtcgtatccaagtaccggtcaagtttgacaaataaggtattttgggttctctaagtgtcaatgtactaacataggaagcatactcgtccagaattgaatccagttcgtgtgaatgtgctgctccttctattgttactcgcatacacattaaacgctttttctttaattcattttcaaaatctacaattgcttcttctgtcccagaaactatacaagcagggccattaactaccgctaaagaaatggtatgttgatattctttttcaaaagaattaatcaaatgaattaattcctcttctggaagtggaacgctaagcattactcctgcaggaagactactcattagctgacctctttttacaaccaatttaagtgcatcttctaaagtaaatacttctgctaaacaagcagccacatattcaccaaatgaatatccaatcattgcttcaggtttaattccccaacccattaatagtttcgcaactgcgtattcaaacgcgaaaagaattggttgactaaattccattctttttaatttttccgtcgcctcatcaatactgaaagtagttgggtataacacttctttcatgtttacattcgtaacagattgaaggattgcaaagcattcatccatagcttcacggaaaattgcctcttgttcgtataattctaaccccatgtttacatattgcgatccgttcccagaaaacaggaagttgattttaggatgttcctcttttacatttgcatattgtactcttcttccgtctggctggtttaattgttcaattccttcttgagtactggaacaaactaaagctctcctatgcttgaattccttacgtccaatttgcaatgtataactagcgtctgccaaattcaaatgaggattctgttcaaggtgatttcctaaattcaaagtcatacgatccaaagcatctttcgattttgccgaaatcattaacatctggtatggtctactatttgaggttgcttcaagctttggtgcctcctccaaaataatatgtgcatttgtaccaccaataccaaatgaactaacacctgcacgtaatggtttattatcctctttccactcatttaattgttgatttacataaaaaggtgtattttcaaatccaatttgcgtgtttggttttgtgaaattcacacttggcggaagaacctgatctttcatcgcaaagaccgttttaattagaccagcaacaccagacgctgcatttagatggcctacatttgctttaacagatccaattggtacagattgtttttcattagagttaaacacttcactaagcgccttgatctcaatggtatctcctagtttagtagcagttccgtgtgtttcaatataggaaatggactcaggttctacatttgcttcatgttgcgccattttaataacttctacttggccctctacactaggtgcagtgtaaccaattttccgattcccatcattattaatcgccgttccttttattactgcatgtatagtatccccatcatttatagcttcctgtaaaggcttcagaacaacaatcccaacaccgtctccaaaaagcattccatttgcattttcatcaaaaggacgacaatgaccatctgaagaaaatagcattccttcttggtaggtataacctgctttttcaggttgagttaatgtaattcctccagctatagcaatatcacaatgcccctgtaataatgcttggcttgcattatgaatagccaccaatgatgttgaacatcccgtaaagatattcatacttggtcctttaaggttaaatttgtaagaaatttgagtactaagcgagtctttgtcgttaagtaatgaaattaaaaattgcccagctggttcatttgcctctgatagagtagataacacttgccaatataagttaggagatgccccactatatacaccaattaggcccgggtaggtctcaatattatatccagcatgttcaagggcagaccacgcacattcatggaatactcgtagttgtggatccattaatgatgcatcttgaggtgtataatcaaagaatggagcatcaaaattatcagtaccctccaaataccctttcgctttaacataattagggctttttacttccataggattcacaccagattcaattaactcttcatctgtaaaaaattgaatagactctgtaccagactttatattattccagaattcatttacattctgtgctccaggaaaacgtccatctattcctataattgcaatatcgttatcttctttcgtttttcgattaaaacgttttgtatgtttaacttgattcttttgcttatctccacttaagtatctcgctaaagaacgaatacttggatactcaaacataactccaattgaaatctgtttttctaatctattaattaatctctcatgaatttgaattatatgaagtgaagttgcaccaagatcaaagaaattttcatttacatttacagtatcaacactgtaaaactctttccaaatccctataattatttcctctacttcatcttgatttctgaacttatctcccgttttcgtttgagtttgagtttccaatccagaaattcgtttacgagaattcagattaatccattgatcaaaacgtttatttaaatctcctgaagaaataattacctgatttaaaccacttaaaccaagcacacattggaatgttttttgtccttcctcagatgtcatttcaagcgcttctatactttgagcattgaatattttattaacctgttgagctcccgtgtactgccaatctccccagttaatactggtccatcgattattagatgtattactcactttgtctgaaaaactatctaagtaaaggtttgctgctgaataggctacaaaacctaatccacccaaaataggtgaaagtgatgaaacaagataacaaaaatcaagatcataattactcaataacttatcaagaactagcacaccatgtactttaggaagaaattgctcttcacattcaatcctacttatcttttccattggacactgagctgatttaacacgtaagacacctgctgcatgaattactccatttatgtgaccaaaattagcctcggcctgatgaatcacgtttctcatctgctcttcatcagcaacatctgcaacagctgtcattacttttgctcccaatgactccaacttctgaatatggttaatacgttgacataattgttcattttcaatctgctcgtgaagaatctgatcccattcttcacgatcaggaagagctgttctactaactaatattagtttagcctttactgtacgcgccaaatattctgctaatttaaggcctactcctcccattccaccagtaattaaataaaccccttccgatcgaatattcggaatttttgaagctaattcattttcatttattactagcatttcacttactttttcatcaggtataggctcatagattcgaatgtaacgagtgttatttcgaattgctattacagtgtcaataatgtccgtttgaatttcaaaatataagtttgatattaatgcttcttcattatcagacaacataaaatctacactacggcatctaatatttggatactcttgcggaaatacttttataggagccaaaagagtagatttttctgcaataatagactcgtctcctactaccttttgcatattattcgtcataacatttatattgataggataaagtaaattaaatttactaattgtctttgcaagtgatattaatgaatagaatccagtatctaaggtctcgatacctaaatccttattatcgacattccataggtgaacaatctcctctggtaaacattcttgtttttgtagctcattaaataactgataataatcttcttgttcagtagggcatattgtaaattcatttaaactaatctttttatatgaaggacccacaccgactgttataacacgatgtccatctctttcaagtttttctttaagagctaagcctatatgctcattgtctaaaaataacaaccaacttttagtagatcctttagttacatctacaatttctttttccatccaccctggagtatagaaccactcagctatattagaacgtttctttatcgatgtttcttcattattagttatattttgctgttcagctggatctatccaatatcgctttttctcaaaaggatatgttggtaaggcaatacgtaatctatattcctcttcatacagtttactccaattaatttctacccctagctcccacgcttgtcccaatacctctaacaagtcgtttcgtaaaataatctgattattattaatttcagaatttaataactctccaatatgtacaataacagaattaggatttacatccttaacttgtgttagaagttctactttttctccatgcatccattctgtctgtaactctgtatagttctcaactaattgattcaggacatcttctggcttaagagatttattataaatatctgaaaccattccagctaggcctgtatcaataatgttagaaggacgtacatcacattcaattaatacatcaataatcgattgcaagcagacgaagaaggttaaatcttcaaccaagctatcatctgttcctttaaagaatgcttctttcaatgcttttccagtatacatttgggcatcagtcatattacgctcaaatacttgtaaaaataatggttccttttggtatagttcttttacattctcaataattgatgagtattcgctaggtaacacaaataccaaatctggattttcttgtattttcacgtgaaaatctttaactgtttttaaattgtctatggcgctatctatatccttacataagaccgctcttctatacggaaatggtcgacggccagtttgcaatgtgtatgctacatctgctaattcaacatctttattagattccagatattgaaccaaatttactgtagcattatttaaagcttcttttgatctagcagaaagaaccattaactttttctctctagtagaagcagaacttttaactttaggcgcttcttctaatacaatatgaacgttagttccaccatatccaaaagcactcacacctgctcgaaggagatcattatcttcactttgccaattcaccaaatcagtattgatataaaatgggctatctataaaatcaattttcgagttagggcgcttcacatttaaagttggcgggagttgtttatgcctcatagataaaactgtctttataagtcccgtcacccctgcagctgtatctaaatgacctacattactcttaacagaaccaattgcacaaaaagatttcttgtccacatcttgaaacgctctctttagagcctctacttcgatagaatcccctaatggcgttgccgtcccatgcgtttctatataactaattgtagaaggatcaacttcagcaaaactatgagctgcttgaattacttcagcctgtccctcaacactcggagcagtatagcctacttttcgactaccatcattatttgctgctgatcccttaattacaccatatatcgtatctccatcagcaatcgcatcttctaatctctttagtattaccatacctacaccatcactaaaaactgcaccctgggcttctgcatcaaaagtacgcactttaccatcaggtgaacttgtcattccttcatggtatttataaccattctttttaggatacgttatagatactccacctgcagctgcaatagagcattctccagttaacaatgatctacatgcaagatgaatgctcaaaagagatgtagagcatgctgtatataatgtaaaactcggtcccttaagtcccagcttataggatgtaagcgttgaaattgcatctttataggaaagagtacctgcctctgaaaactcaaccacactatcactgtttaataatggcgtgtgcttcatccaattaaaattagtagatgctcctacatataaccctattaatccttcataatcaaatggattatagcctgccatctctaatgcttcccatgtcgtttcctgtaacatacggatttggggatccattattttcgcttccctaggtgtataagcaaaaaaggattcatcaaaatattctacttcctccaaatacccttttgctttcacaaaattaggatgttgtaaaacatctaaattaacaccttctttaattaactcatcttcagtaaatgtagaaattgaatcaacaccattttttaggttatcccagaattggtttatttcatttgcacctggaaatttacctgccattccaataatcgctatttccaaaccagttttactatcatcttgatgcttcattttcactttcctcctattttgtttaattcggattttctatgctttacatactcttagctacaatatttagagctaatacttctatttcataaacttaagcaaaagaaaaaacacatgaaattacccataaagtagctaaagtgatttacatatctgacagaaaacaaaaaattttaattacgatttctattcctggatttcaatgatattttgagcactcatttttattctaaaaacctaatactttggtaataattctgttaatattacactttatgtagttagtaacatattcacaagaagttttctttaagaaattaatttgtagagtaataattttgtaggggttttatgttattaaattaagcatactttttccaatatcatatagaaaaaaacaaaaaagtgacatacagtgaatattgagaaataaaattcatttattccatatctaaccaaaatagaacgaattttcaattttaaattagattttcttgcatttataattgcattctctataaatcatctatgttgagcttttaaacgttaaacatcaatgaagttatatgcgaaattttttattttagatgaggatctatacgtgaattcattcaagaggaattacatatactacagatttaatattcttcataaagttatatacataaactaaattccttcaaacgttttaagaaaatattgaggatgaacatcgttagtggaacgcttcctaccgaaggcaaacttatttctaggattgctgacttacaattttgcattgtactactcctaagacagaccaaataagttcatatgctacagtactgtttatccttccgttcatgttgttgattttctgttatgttttgatatgtacagacaatatttttatcttatacccatagctattgtcctacagacactttatattatcttcaaacccactatttcacgaaactgtaaaactaaaaccactaaatttccgaataaactgaaaacttatgagaaattgacaagaaatctcaataagatcttttcaatatatcttaacttcaaacgtatggaatcaggactcaataatgatgctatacagggaaatattctactaaatagaattactaaaagagatatctatagagagctcggatgttaaagaggctactttagattttgttgaagaaatatcacaaaatgtagagcaaggtgcagctgtaaaaccctctcttcttagacgagtaaaagcggctttaactgatattaactcaatggttgctcattactcccaagttgcagctaagattagccaattcattagcataatttgaaatatcactttttgggaaaattcaactacaaaattaaaattatttttacaattcgcaaaaaccgtcgttaaataaccaaataaaaatccagtgatatcagtatgtttgcttaacattactaggttctatgattttaacattttgtatattttgaaaagctcgttttgatatgtcgaatagcttcgtatattaaaaaaattaatattcataaaaataaatattaatttatatgtttttataaacatattgaatttatgatttttttactacgggaggaagaattaaaatggaacatattaatttagtatctttagttaatgctaaaagtaaaataatggatgggaagcgatatattatacaccaagtcggcataagacttatcattatgaattttatcaaaattcgcaagataaaagtgcacataaggttattggacaggaatttgataatgtaattgttgtaatagattctcattttatctattataaaaatctattaacaagtaagaaggattactattatgataatataaaaatgctctatcagatggtaacaagggctagaaaaaaactgcacattgttatcattgataatgaggaaatcttagagaaatgtttaaatattttaaaatctaatagacaggtttcaggccaagataaaaagggatttttaaagaaatatctagaaattctagaatctaatggagaaattacagaccaaaaaattgaaggaaatcatgaacagcaaactttaacatgaaagaaacgatttttatatgctaacagcattttaatgaaaaatattaaaacataatttgaaaatcaataaaactcccataatgaacacaatataaaatataagagccttgttacatttttgtagtaaggctctttacagttttgcatgtttttaaatattttatgcagtaatagcaagagaatctaataattgttttatcatcaatgagtattcttgatccttattagtaaatgattttagatcatctaatatcatttttcttaacatatcgtcctcagtattctcatattgccaaattaagggttggattttttttattaaatcacttctatgttcgattaattcaattcgatcaagctttaactgtttgatagttttatatgcacttctacattcaggttttgcaaaaggaatgggtccttgaaatattatttgattttcgggggaatcaatatatggattaagtaacggtaaagtatcatcataataattactcttactctgattacattttgcacatccaattgtaagattatcccacgaaaatgttttttgagggaagatacttttaggtattatatgctcaatatctccataatctatatgaagtatcttactttcacagtatgcacatttagaatatgtttcttttaataatgcttccttgatttcttcgtgacgatatctacctttaatataattaggtactttttcaccagattcttcaaaacttaacaattcatttgtccaattgatttctttctccaccaggattgtcggtttggacgattttattaaagaaatcattagtagatacctccttgaaggattcctaatgcctgaggcaaatgatctctcaatccaactgtagcaagttcatcttttagtctactataactttcaggtgtaatttcgtatcctttaaaactctttaaaatctcttctaatttgttctctacccatagtggcattgttatagggacacctaatacatctcttaagatttctgaagcattcgacgccttattttcgaagtctaataactcgctaactactaaatgattttcattatattttagcacaaagatggaagaatctcttacagagtttaccattaaagggctatgtgtagaaattatgaattgtgcattaggaaaggcttgaagtaaactcggcattaatcttctctgcattgaagcatgtaaatgattttccgcctcatcaattaatacaatatatggctcgtatttatctccatcatacatatagatttgccatgctaaatctaatattgcacctataccgccagaaacagcatctaataagaaatccccactatttgtttctaataccacttcaccatctctaattgaaatctttttaaaacccaatgttggtggaagaagtacttttagtatttcgataaatcctaaaaataaatctaatgcttctttattttcattaacatgcgaattaccttcaccaaatagagctaaacttataagtgttgatttcatttgaaaggaaggggaatctccataactttcaaataatttattcattaaagagtggttaaataagctaaaagcttcttctctagaagcaggtcttacaggaatgtttccaactggtttataagaatacgctattctatgagaaggaatattgataccttttaaatctaaagaattattagtatagtaattgagaccaggagtttcataatttatacaataatttgctgaaggagttaaatctggaacaaataggtttgcagtcttaccattaaaacactctaaactcccaatatttatcttatcttgttgctctctaggttgaatttttcttctaccaccacttttatatttcaaagatgtagtagattctttcgatggtatagccgtttcattatagccccagccaagctgtgtgctaaacattcttagaattgtacttttacccgcaccatttgcgccagtcaagaccgttaacctaggatgaaaatcaatatcaactctttcaaattggttccaatcctttatttgcagattttttagtatcatttgtatcatttcctttttttgtaattccttcttctactttacaatcataatactttttgaagaaagttggttttcattttctatttcataacaaattattgataattatattataatccaaatggaaaggaattttaagaaatatagcaattttaaagtgatttcgaatccttgaatcataccatttggctaaactaatttaaattcggcattttgagataatttaactaaaaggagtcaccatacatgcccatcaacttaagaatttgcactacccccaagtgtcaaaaaacgttattcaaatgtacatatttattcaagcgttaatgtacatatttaagttagcatttataatctggaacacattaaacaaaaataccaagaggaaatatatatattagaaagcctttcaaaagatatagagatagatttcagcaaaatctctcatgaggcaatcggtaagatcctaacttgtgtggactttttagatacgaatcaaacattaagttggagggacatagaatccacggatacgattgttatcttcttactttccatgaacctattacatataaatctatcttgcttttacccgtgtcaatttcattacttacattactttaaaaggatgcattcgctttcgagtaatgtaacacagtattctcccgtgtacttggatcaagagaatatttatgaattagaccatgaagaagaatttgtggaattgggaacggacatgatcgaagagatgggcttagaagtctttcctattgaagaagaagagtatgaaacgctctctacactattcgacataccattaaatgaaataaagaaagtagcagaggaaacatggggtgctatagctgaaacaatagatggcatatcaccgaatcataaagaaaaaatatctaaattactagattgttatccggtgcagtattcttaccaaattgatgaagaatctctttatctctattatggcgaggaacctttatacggaccatataaatttgagatgttactagatttattggaaacaatctttaagcagggggaaacaacacatgaagacagtagcaatatttgatgctttagagccaaaaggaattgtaaccatccagcaatttaacaacgaattatcgcgtggagaaactgccgttacttttaaagatttttatttagctttaaaagaagtgatggagcaaggtacacaagataatacacattactctagtggcgtactcccaaaaggttgtataaaacacgaggtgttatctaagagtggtgataaacaagctgtttggattgaagtaccaaaggctcagtgggatattcatttttttgaacggccgtttcaacaagtaggctttccacgtctattatttcgttatacggtgtatcaaaaacgagttacgaatatctctgtctttgctgtaaaagaagatatggagttagaagaaggaatgaaattatatcaatttccttactctaatgttcatgctagtggatctgtatgtacgggtagagttgtaatacctgaattccggactttaaaagatctagaaacatttcacgttctattctttgcaagttcattcaaccatgaccttacatatactcatacggaaccagtaggagagttatttaaacgatttgaaaaccaaaggtttgatgattctattctaatagaatcggaaattactttttaataaatagcaggattatatataagcaaacatactaggaggatttttaatatgaataacttattcgatttttttgatatggaaaaacaaatagaggaaacaacagtaccagtgaaaaaagctgcttcagagcaagccactgctaaaaaagtagagaaaaaggaaaaagcaaaagataagacaaagaatagtaagaaagctaaggctgcaaaagctacagattgtctagataaaatcaatacaacaacggttgttcgtcacgtggtatttggagatatatcgttagtagattggtttacagaggaagaaattacacatggaatcgctgttcaaaatggagattctacagatgtaaggaaaatagaagcagaggacattcgcgtaaaattagagcaacgttatccctcatttgttaaaggcttaactgtcattaaatttgatgaggatacaaatgcactacttccgattttaactgtcggcgcaaaaggagcaagtactgtagagggacaatccatttcagattgtcctttttcttttttaagtacttggcgtgatcactttttacctggggatttcattccgaggaccctattaatggactttattattattgcacaggccatttctcgtaaatgtgattgcgaattgcatgctgatatctatttcaataaagagcgtggttattttatggactttccacgacagcaggtagcaactgaaattgtaatcccagaaacgaatatagagatgcagtctatcgctatgaaggttatggagatacacagtcatcattgtttctctgctgaaccaagtgatttagatgatcaaagtgaacgggctcctattctttatgcaattatcggcagaatagaagctgttttccctgaactgcgtgtacgcacttgtctagatggggaattttattctattaaccctaactttatatttgcaggagaatatgcagcgaaagggataagccaaaattacgatttaagtaggattacacttttaaaataaatatacaagggggcgtaaaagagacatattttaatgtctctttctttattatgacaacattaaaaacaattcacatttcaatgtttacaaagataaaaaattacatgttagttcttaaacaaaatgaacgtgttttagaggaaccaattcatgattataaactatttcaatttatgtgccagttagagatgaataacatacataaagtattagaaggacacggaaaagatacccatattgatataaacatgcatcaagaatatatagatacgcttgttgtgcagttgaatttacttcaatatgttttagacattgtacaagaggaaggagtcgtccatgctgcatcgatactattgaagcattcatttgacttgtataccgtgcatcggattacaaatttatcgattccatttctacgaaatttagagaatacactatcaaaagaaaaatagggggctataaaaatgagtattgttattgatattgcagaaggaaagaagattgtaccgcatattgtattagtaggtgctggaggaaatggtggattaattttacagcatattgctcaaatgatgagtattttccaattaaacggtgaaatagtagttgccgatccagatatcatagaaactaaaaaccttggaaatcaactctttattcgacctgatgttggtaaatacaaagcagaggtactggctcttcgatataaagcgggctataacgttcctatctcttcctatacgtcacaatacatagaagacatagaaacaatgcaacagttgtttggcaataaatatgatttattaaagaaacaacataaagacgactacttgtatctgccaattgtgattggagcagtagataatatgttttctcgtgaagtcttccatcaatcggataatcttatttacatcgatgtagggaatacagctgtaacagttcctaataattggagagaagtagataaaaggcattggacacctcaacaaatggccgattataaaagcagtggttataacggtcaagcagtatgtgggattaaactgaatggtgaggtcattctttctccgattggcgacttatttccagatgcttttacaaaaaaagagacagcaccaagtcaattaagttgttccgaattagctgcttcagaaccacagcgtgttattacaaataagttcgctgccatgactgttgcacaattcattaacgaactctttgatgaaggtaccgtatcaaatcactatatcatttttcaagctcaaaaggcgtttatgaaagctgcaccaattggtgagtaatgatataggaggggacaaagtgagagtgtatcaattagattccactcaattacaatgtacattaacaccaacaaacatgtgtgatggtgttctacaatactaccaatataaacagtataccgttgtatctgtactggatttatcaaagcatgattccgaaatgataccattgcttctggcttgtctagcagaggctctgattcatttctatccggattcttttttagctaaggataaatctgatctcttatattggtgtagaaagaacttcaaaggatttcatagtatttctgatgatggattcttgcgagacttcaagcaggtatacgaatgttatcaagcattgcaaaacgttggaaaacaagaaaacaataaaaaaaaatatatataatagcagggagaagagaaacgcatgtataatatacttaaacgtcaatttaattacattatccgaggggtgattcggattaacgaagaggtacaaagggaattggacctattggtgcaaaagattcgtgaaactgtatcttctgtccaaaaaatcatcctttttggctctcatgcatatggcacaccaaatgaagacagtgattttgatctctgtattgttgtggaaggtgtaggagaaagaaaaagggaagtcattaatcgtatcaattgggggatttacgatgtaatggaaacgccagttgatattttagtgtatgggccagaagagtttcaagaacgtgctagccgtactgtaactatggaacataagattgcactagaagggacggtcctatatgagaaatattgaggatctaaaagagtgggtattcatagcaaaatccgatttagattctgctatttacttatctgatatgaaacctttccccactgcaattatttgttatcatagtcaacaatgtgtggagaaactcctaaaaggatttcttgcactaaacggtagaccagtccctaaaactcataaccttttaatgctgcataaattttgttgtagattagatgaggagttctcattgattttagaacaatgcgtgcagctgaatggttatgctacagacattcgttatccttattttgaagcccttactgtgcaagatgggttaatagctatacaacatgctcaaaaagtaattcgtttttataaagagaccttaaacaagctaaatataaatgaaatcgtaatcgattaaatatagaggaaatacataaaagagagtgcctttaagggactctctttttctatctcaaaaaaaggaggaatgccccatacataaaaaatagaatcttatttttctatggggataaaaataaaatgatggatatatataaagaaattaaagaggaaatgaaaaaagtctatttatctcgcgattgttgttttgtaggttacagcgggggaaaagatagttctgctatgttgacattgctatgggatgcgatttccgagctgtcgctagaagatcgtacaaaacctattcatgtattaacttccgaggttggggtagaaacacctgttatgactgcttatatctcacgtacattaaagaaaatccaaaagagtgcggataagcaaaaccttccgtttatagtacacagtgtgagaccattaatgaaagattcatattggtataaactactaggtagaggtgttcttccaccaacaggaaatagtagactacgatggtgtactgattcccttaaagttaaacccatgcaacgtaagatgaaggaaatactaatagattcccaaactaaaaaagtagtagactgctttgaagagtatgatggagtccttgcgttggccgttcgtaacgaagaaagcgcacgtagaagacatagtattcaaaaatatgcagtaagtaatgaatctttattttcacgtcacaatgacatgaaaaatatactctgctttaatccagtcaaattcttaaccggtgatgaagtatggatgttgcttttagatagagggatactgccttttggtgtggacgttgaagaaatgagtatacaatacggacaagctatgtttgaatgcggcataaaaacaggcggaaaacaacaaggaaatgcttgtggagctgcaaattcgcgtagtggctgttggacttgccttatgatgaatggtgaggataaaatgctaacccaactaataagcgaaggatatacagattatgcttatctacaatcatggaaaagcttcttacgctccattagaaacgatattcgttatcggaatgtaatgaataggcgaagtctgcaaacactccttaaaaacgaaaataaaggggattcggacttgttttcaattcaaaatcatgctgaatatgattatattatgtttgatcgcacagaaaaaggagactatgcaccaggagggcttacggtagaaggtagaagaatgcttttagagtatctactttttacacaacaaaagatgaatacaaatcttatttctgaagaagaaattgaggcagtgctgcaagcctggtatgaaacggatggaattagagtataccgagatgaattggaacctatacaccacgcatatctaggtgaattggtgttcaaacccgattgtacaataaatgaggaaaaaacaacgtctccatttcccgtattttttgtagaaatagatattcatctagggaagcaggaactatttcgttggattaaagagcggcaaagaattacacaacaaagctttttcttctttccttcaaattattcaaatgaagttgcaaagttaacatggaacaagctaacctttgttgtatctagagtagatgtaacagaagcaagagacgctgaacgaattgttcgtcattggttaggaatggatatgtaccatggaaagaagaacgaacaacataaacaaatgctaattcagctattaattcaatccatgaagaatgaacaattgtttaaagaagatgaaaaagctagtacgaagcttttgtatgctgcagagtttacaaatagactgtctagattaatagaaacagaggaaatactatccgaagagacaaaccatctctttgcaaaagtacttaaggaattaggaaacgaggcatttctaatagattaataaatattagaaaaataaattaataaaagacgtgttctataaatagaatacgtctttttattttagtgtgattaatacattcaaggtaagctcatttttgatatattatgtgttatgtattgtattaggaatctttttcttgattctcattttcaatattttttaatgctacatgtttggatttatttttgaaatctaaataactaatataagagagtagttcctcttcgaataatagaatatcttcgcattttccgtacaatttatgagccaactgtgtaacaactgctttttcatgttccacgttatctaaaacctgatgattaaacaagtaatctgtactaaccaaaaaatagattgcaattttttttaccatatcaaagtttggctctttatttcctaactcccaggaagatattgcacttcctgttacccctaactcgatacctaatttgtgtagactaattccttttaatgttcttaaattcctaaggttctgcccaaaaatatttcctttcaatcaaatcaacctttcaaatttttaattgacaattagtatagagttgaaataaagttactatattttaaaaaaagtattcatcaaactttattctaagtctacttacaggtcactgtaaatattgataatatctttttaaagatattttagttttgaaccccatcctacttaccaaatctttttcagttactccttgcttaataagacggagaataaaagtgttcctcatctgctgcgcagaaatacgcctttttagtcccgctcgtttcacttcaagtcgtatcatcttttgtatagcaacttcagacaaagcttttggcatatccttttcgtatacccaacgatacgtacctcgattaaaatcaaatgccacaaatagaggattatctgtgtgttgtctaggtcttactggttccggaatagtcttgtaatatttataaagctgctgcgtatcttccatagttaaaaagacagacctagttgctccattctccccaggtaccattaagatatttctagcaaactttatatggctcatattaagcgatacaagctcatgcaaggacaacccatagtttactactaaatttataatacaaacgtttctatccataataagagggcgatatttagcttgtctttccgttaagcccttcgttgatagaacagtttgttttaaaagcttttcttccatttcagtaataaaatcattatcatttagtgattgatccggaattaaagagaaattaataccatccaatggactaactatacctaaaaacatgtgtaccttcttcaaaaccacccatattctgtgtcttgttttctgagaatatttacgcttgtcttctaactcagagaaatacgtctgatagtccgcttcagaaagttcacgccatgatttgatatgtagaagtttctcattttctcttagccacttataaaaatctttaatatcgtaagcataacgtttaatcgtggattgttttcgtcctttttctgttaaataagcagaaaaggctgctaatgtttcttctaaattaatgtttttgctcattataatcacctaatttcttaggaattattataacagaaaataagtgaaagacctgctaccgccctttgctacgcacggttgctgccatctccaaaacgcaaacggacaaacaaccctttgcgttttggagatgttgattattatctataaagtaaaataaacagggttatcataatactccaaaaaggaactacaaaaactaatccccaaaatattcctttgaaaaatctaatctcgttataggtatctatatctaagtaagtcgtatctttaagtacagtcatgtttaatcctccaaatatgaattgtttactaaaatgaaaaaaggacaaacctcgccctggtagggatacgtaggtttgtcctttagtatgtgggtaatgatatgtttattttccattattataacgtaatttacaaatattttcaatttggtcagacatcttattaacaatcatactagctgtattaaaaatctattataaatatatatcttatatattaaaaagaaataaagataaaactattataggtatcaaaaataggggaaagatctactcccacaagggaaaatttgatgttagaacgtaaaaaatcataaatagtagaaaatgtatacggaaattcaatgattattagactatcaattctacaaaaaagcataaagagaattatatatttctacatgaaatcggaaagaaattgatacaaatcactttatatttatccaactatggaaataggctttattttctttattttgttaaatacagcagtatctagcgttcaattacccacattttatccagattaagcttctaattgttaacattactcagtatatacacataactcacattattattgatgatttttattagataaatacaacgacactagtagttacaatgatatcaggaaaatattattcacattcaagtatatttttcctcatatccactatttttattatttttcttctgattttttgtaggtattatgagataggttttactactttaaaagaatactccctagcactatgtggagagttctataatgctagaagagaatttgtatagaagtgcataaaaaaagacctcattttacatgaagtccttctgattttgtatttataaatagagtagtagaaaaggagtatgaatgaaacaactacgaatagccctctaatttcgattttttcaaaaatagagagctcgttactattattttgtttccattgcgtgtagcacctgatctggagctgttattgttacatcggcacgtactaaacgttcgaaggtacgcataaactctagtaaattaaactgctttggtagctcaataacgcgaagtttttcttgtggcagcttatcaattgcctcgataaaccattcacgaacatcacttggaatcgtgcgttctttatggccacgaacttttagtttttcacgcatttcaatttctaaagcgatatatgcatggagattcactccctgatcatatgcatattttctaaataacgtttcttcctggtattttagataattacggtgataagactcttccgtcactggtaccgcaaacttctgcttcagtagtgcatgcacattcttaaacatcttcttaatgttgtgaagagagtacatagaataatgtaaaccgaaattaaagacagcttgctcacggtcactatttctctcttttggtatatgctgcgcaataagagggtagataccttcttttgctgctgtatcgagaatttgatattgagatgtttgatgcaataatttcttcaatgtatatacaattttcgttggatatccttcttttcgatcaaccatgtcacgtagtccgcgaatgacactgcgaatttgacggtgacaagtatgctttaagacatgaatgaatttattcatgtctgcagacagttcaccgatattcatctcttgtaggactgcttcgataaatttcgcttttcgagcataggtagcttttggtgtaaatggatccctatgttgttcttctccagcttctttcgaacataagaagtctgaatggatagacagatataatgtcgtatatcgttttgtatgctttacacctttttgcattttacaaattttgaataggggattccctgtacatggtaatgcagttgttaattcctcgataaccgcacggatttgatgcggatattttttatgtaagaaacaatacatcccaccgaagtgagttttgtttcctctttcatcctgcttatccaaagaacgctttaatgttgtttccgtatgttgttgcatcgcaatgtctaagaatagtttcttagctgctacagatagtttaaagaaagcctttgtaaatacaacaggactaatatatacgtatggatttgctttttctgtttcctcgtttataaaatgagtcagtttgattgtatatcggccatctaagccattttcaatagatataatgttatgtaagcttaactttttcaaagcgatatagaattgagaatgctgaatgtatgcaagctcttctttatattgcttgtaatcttcccacatcatatgtattgttacatttggaatgacaccatttgtatagcattttttatgtaagtacaagaatacttcaagatctgcattcgtaataccgtataatttatgttttcttccggttttttctgcaattgcagacattgcgcgacgtgaaaaagatggcttggctttttcgacaaagccttctacgtcagcaatacgttcttcgtatgtcatgtgctgcagaatatcttctaaatatgtatctttatagctgtagtatttctcctcaaatgtttccacaaacttttgccaagatttgagtgttactagcacagcattggttgtttccccatttaagctacgttgatttcgtattacaaatgatttccccatctttttcacctccgttctgcaaattcagaaatatatgccaaaagactataaaatattccaattttgattatatcaaaacgaattttgtaaaaacgtgccctttaagagagtttttaaaaagaggaaacacacgctaaccccttgagccacaaggcctcaaaaaaaagttacaaaaaattttatgtgcaacttttgtgaaaatgtgtttcctgtttcggtgctagaggaaacatggaaatcacaataaaccttgatttaatcatattttttactcattgttctttagttacgcgcacgacttgagaaaaatgtttcctgttttccgtttttttacgcgcgcgacttgggaaaaaaatagagtttatttatgttttgaaaaaacgaagatactatagaactattggtataaaaggttttttggcatgtttataaaaaagttacgcgcacgacttgggaaaagtgtttcttgttttgtgttttaagaaggaatatgtttccaaaaagtagtgtattttgttgcaggtgtttcctcttttttcgttatacgcgtaacttgggaaaagtgtttcctctgaaaaagaagaaacaatacaaattgaatctgaaaaattagcaaggtatgattaaatatacaggagaaaatattaagagaaatttttttaaaacatttataaggggaattgagaatggatcaaagaatagaagaagttaattataaactaatagacaatggtatatttttcagtgtgaataagactcaacttgcacgacactttctaaataatgttcttgaaatcgatgtatgtaatctaaacaaagaagaagttactaaaataatttgtgagaaatatggttataaattaaaacagttaccagatgaagaagaaatctatctatttgtagctcataacataatgggaattaaagaggataaagagccttatgaatgttttaaccatgaggtttttcttgtaatgaaggatttaagaaaaattaattttatgatccaagaatatgaatcaaaacagcaagttaaagatattgatagatatgaaaagaaaaagtatcaatacttagctgaaaagctttataaggcgaaagatgtgatatgtgaatatatgacaggagaaatcaattcatgtatatataaagaagtaaaagattggagtaaaccaaatggatttcctagctccggtagttttaatcaaatgttaccgagtcgatatgcttttagaggtagggaagaagaatatgaaatgtcagtttttgatggattgaattataaatttgaatttattacgttacaagagcgaaatgaattgaaacttctacacagtaataataaagatgaatttaatgaacgtgtggatagatatataattacacatgaaattgacaataaaatattatctcttatagaggaaaatcatgtacttaataagagaggaatgcttaaacaagcaatagaaatttataaagaagatatgatggaattattctgccagattatacctcttcaaattgaggggataatatatgattattgtattgagttaggggtttcttcagcaaatatagaacgtacctctttggatagaaaaatagaagagatagtaaaaaaagatagacggttcaaatgtcatgaatattttaagtatgattttattgagttaagaaatacagcagcgcatggaaggttgcacgagaatgttaatttcaaagatactgcaaatatgttaattttagatttaatgtatttatgtgatgctttaaataattctaatgcgctagtggttaacagaatgagaagccttataaagaggtttgaagaaaactttaataatgattatgtacctatagacgggatagtatactcgtttatagcaaaatacagagataagtcccttccatctatttatgagaaggaaaatgtaatacaagaaataaaaaaatatgctatgagcgataattttttgagatatatacatattcacataatgcatccttcgttggtatcagaattatcaccggaacagaaacaagaaataaaaaaaattatagtttatttaatgcgttcaaaagaaattaaagagcgatgtgtaaatttattgaaattattagcagataattcaaaagaagaattagtacataaataagtatgcgcaccatattaggtgaataggaggagaatatggatcagttaaaacaattgtttcaaagtacattattagtggcatacccactatttcaaaatatagaaaataacgaacgaatctttaataaatggagaggactttgtacgttaattaatagcgatgttagttatttagaggatcctatgtacacatctgtctcctttaaaaaatttgcaaattggatatcgtataaggaatcccaaggtgttggtattatggaaattgttgctcaaatagaaggataccgaccagaagtatttgaattacttgctaatgatatagaaaaagaatttgaaattcttttagtgaaacaaaaacaagaaaaaaaacatacagaggagcagcagagcttcatcgaacatagtagtgctggttttatgtaccatttaacagacacaattgcaaaaaataattttacagaagataaggaattgaatgcccatattgctgagctaccagataagagtaatagccttgttgtggtatcttcacgttttaatgatggtgatatgaaattaagaggcgcaggggagttaaatagatggaatacattagttgattctacttttgttgatcgtgtaatggatgatttaactgctgattgcttggatattgtaacagaaatatgggtgaagtcagcaagcacggaaagtagtccagtacatataggttacgaagaaatattagaaatgtgtagtatgaagcaggtgagaaatggtaagtcctattatcgtaaagaggaccgtttaaagattatggagcgtttagctgcactggcaagtatttttatatatgtaaacgaagataatgaaatagttatactaaatgatgatgagaatccaaatgagtcacttgcttataaaaagcaacgagtacgaagactattcgtaatggatgaaatagtatttgctaaagatattgataccgatgaaatgttaggtattgaaagtatgaatgttgcacctggaacatttttatctaagtatttatatggatcagaaaaattgactggtttgttatcgaaaaaggcccttgaatacaacagtaaacaacagcgatatcataaaagattgactaggtatttaagttggagatggcgaattcagcaagcttatcagcatttagtacacccttattcaatcggtggtccaaaaggtcttataagtgttatgggtgtaagcatgaatcaaaatcctgccagaataagaagtgtattcgaaaagacacttgatgacttaatgcgtgatgaagtcatcaaggaatggcaataccaaacaccgattgatgaggggaaatgttctgggcgtaactggcttgagaattattggttaaaccttaaagtaacggttacacctactgatgagttagtatcgttacagcaagagcttttacaaaagaaaaaaataactcctaagaataaattgatggaaacagtggtaaaagatccagtaatagaagtacaggatatggagatagaagaaattcaaacatctcaattagaacagcaacaggtaaatagggatattaattggtatcagcagaagattctccaatataaagaagaaaataagtgtagtttaagagatatggcaaaagaaatagagatatcaccatctaatctttcaaaattgttaataggcaaaagaaaaagattaagcgaagaaacacataataagttagataaatggattgagcgtcaagaggtagttaatctgctgtaaattatggttaaatataaatcaaaaaaagctgttggaaacaaacgaaaagtgtatgtttccaatagctttttttgattatacagttacacggattaaaaatagtatctttattaaaatcataatgcatttataaattcgtcaaatataattttcacctctttcttaacagaatcaaacacctgttataaagttgttaaaaaaatgcaaggtttattcaacaattgggcgagagaatatgggagttacataccttttaagtagattctgatctacctgtttaaaactaaaagtttcgagtaaagatatggttagttgttgtgtaaataaatggatatttaaatacaaatgaatatatattttatatttgataaacaaattaatttaattagtattttccttaataatagaatcaattgtactttgttttattacccctgatttttctgatttaagatgacaaaaatttttcaaagaaaaattaatattctccaatgcttttatcaaatcagatattttacttgattccttactaaacaattcttctaaaaaattttttttaaaaggcatccaaattaaaaagacagacataaaaattaaaaaacctaacattaatagatactgaatagcttctgctgatgtcttaatttcatgattataaacccagctattgaaagctgaccatactggaatcgtaaacaagaaaaataaagaaccatagctagacaaaagttttaatacatttaatttctcggtttcttcttttttttcctttaacacctgtattaaaaattgtaatgactcttcattgaatttaggatcattatttaaaagttctttcttaaataaatatgattgaacaattaaacaaataaaaacttgccattgtttgcttttaaacgagatattatatttattaacagaaatcaaaatagctggttttactacaacataatgcatacataccaaaaacaaaatcatataaacaaaaaagaaaatcatataaatatagaaagaatcaaattcaatatcatgttcgacaaagatgtttaaagaaataataactaaagcggctattgaaataaaagtagcaaccaaaaaaataatattttttaaaacatacttataaactaaattccatttacttaactttttcgaataaaaattaaataactccaattcaaaatcaaacatataattctccttactattaataattataccttttaataacattatcaccagttctactatcgatgtaaaaaatatagcaattaccatacccacttaaaaaacaatttaatatacaagaccttttgaatttttacgctgttcaaattcaaaaataaccatcggaaatctatgaaatattaaacctattttgaggataaattattcgaactgaatacatattaatgttatattagaataacataataaaaataacataaaataataaattcatgtacaaaactataaattaaaaaaattgataggatatatttctaaaacatataaagcacctaattaatctgttacctaaattctttaggggacaggtggtttgatttttcttgaattcgcacacaattttaggaatggatgtatactagtaccatctttcgcacagttttgtttggttttttgttatcttttgtgagtagaaaacttcactttttaaatgaccaaagcagcttgctataaaggcattatcatggcaatttcctctccggaatatactgataattatgtcgttttctttggcatacgcttgaaacttcttgctgtataaatacttccttgattcgattgtagaaggacatttttacttttgccctcttattgcttgttttgatgtcttcactgctaatgccagtgtttataattgcttgatgacttaactaataatttcacgattaaaggtatccataatcgttgataactaaaaggttacgctcaccaaataatagattagacatatccgtaaactatgtttcattttgtatggatgaatcgaattgacattccaatcgatgagggtctatccctggttccacaccattgatgtatttctttttttggcacacttttgaaagaatataattttgtctcataagtcttaatactttttatgattcacaaagccgaagagtaggagtcactcttcgatattcatatcgtaatttatgcctaagacagatgtcctagattttcttttttaccttatctataaaatattttgttcgttataaccaccgataaatgtggaacagggtaattctaatacgttacacaattcttttacagttatttttatgtttaaacagttccataaagtaacaacaaattccggtttcaactccttttaatttccagataatttccgtatataagtaattttgtttttaagtgtttattttctaagcgtatttgttccaattcatttaattcttttggcacttttctataagaatattgttttcctacagggcgactaaaacaatacgtttcaccttcacgatgccacttcatccaagttttaatctgtgcttaatttttaacttctaattgatccataatttctttgtttgtgtacctttgttttttcagctcgattgttttccagataatttcttctagataagattttctcattcccatacgaggtgttttttcatgtatctctattcggcttcactcatatcaaatacttaagtttttttaaaattcccgtagtctttttatattatatatctaaaaaattatatgatatttatccattaatattttttatgtaagaaaataatagggtatttaaaattctgtaaattataatttatagaattttggagtggttaatatagatttgtatacaaattagatactatttattcatttttaaatatgaaactgatattatcaagttttttacgcttatttggtatcttttttagatactagtgttataatggataacaaggagggaattaaatgaaaaaaatagtgggtgaaaacattaggatatacttagaggcgacaggacgaactcatcaatgggttatggataaaggcggaattccaaaggcgactttttataagctattaaaaggagagggcgatttaacaaaaggaatagaaaaaataaacgaattgtttggaataaaagatgatttttatttctataattcagaatttaaaccaccattaaaattagaagataaattaaaaagatctgatatacgaaattttgcagctgcaaattatgtagccgttgagggcgaagaaacagaattcaaaaatactttagatactttagacgatttcataagaatgattgaactattaaagccttataataatttaaatagaaatgattttatataatattttttatctaatacttaacattaaatatagcctataaatttttggagtatacaacgttgaattttatctacaaagggatgtgaagaagaatgataaatagcactaatatcagggaagttatagagcagaatcaaaaaatacttccttcaatattggtaaacgtagaaagtacaattgaaaagggaattcattttaaatataaaactatagaaagtatacgtaattatttaatgcagaaaacagaagtactacttttcccgagcaaatctttatcttatgggggaatggtgttatatcgaaatggctctttttatataaacataaatactttacaaccgaaaacatatgagaattttgtttgggcacatgaatactatcattttgaatttgaaaaggatcgaatcaaaaatgcggatgatgtaacttttgtgaataatccagtcctaaatgaaaatgagcgtagagcaaatctttttgctgcagagttgttaataaatgatgatgtattaaaaactttatttcaagaaataaaattaaattacgttaatgattctttggagaagaatgtaattaggttaattccagcttttgaattgccttataaaactatggtaattaaattagcacaagaaaacctgattagtatggaagatgcagagagaattattgatcatgattaccgccataatttaccacaagattttgatctttcaattttagaacctacaaaagcaattaagattgatggattaaataaattacttgaatcagaatccgttcaagaaaatatgcttgaatcagattttgaaagtattcaaaatctagcaaatcagcatttcaaacaactggaggctattcgaatggaaatttaaggaggaacaaataaatggaccaagtaaccaatacaccagagacgaaccaagattcaaaatgcaatggaatagaaccttatttacaagatggtaggaaaaatgatagggttacacactattatatattggataataatgtcctatcagatttagcaaagttggcaagagaagagcaaagttccttcaaggagttaatgacatgttacaaaggaacagtatttatagtaccggaaatggtaatggaagaggctattaggaatttacctggacaacagtgggttgatgagaaatatttgaacttttatcaggtaatgagtgaattacatattcccatttatcttgaatctgttgagcataattatcagatttttgcagagggttatggtagtaaggaggaagccttccttcagtataaagagatagccctaaattcaataagtaatattgctattcaaggtgaactaagagaggcaaaatcatgtaaggatattgaaaaagcttattcgcagtccttgaaagatgctggcgaacgatttatttttctttatgcgcatgcgatgttacaagataaagtaaataagatttctattttgagtaatgagataaaaggtgtctacaatgtttggaaagcaaatatgagaaaaggtgaattattggaacttgtcagagttactagtcatgaggaatattgtgaaaaactgcgacctgtatcatataattgtattctagtgaattccttgaaaaagaatccaacattaactagtgaacagaaaaagtcattattacaaattatgagggacagtaagataattggtagaaatgtttattattctcagaaatcatgcaatttagtagatactagggcagatatgaacaatgaggaatttataaactttattgaaaaacatgatgattataaattagcgttttaaattatgcaagttttgaagtgttctatacttttgtatgggacattttttggtttatctattttaaatagaagaatcttacttcgaaaataagaatggttccgttttaaactatgtatttggggaagatagggtgacctatattgctcatgttcgtgaaaataaaaattgagtataaactgcggaagtgctcttattaaaattagttaaattactacaagctttatttttaaataaaaatattcttaaaaaatgacttaactaaagtaatggttaggtctttttcgtatgcttattttataaataaataaggtttaattgagattagagtgaagattaatataaagttttggttttataaagtagagtagataatatataagtagaaggtaattggagagagggaaccaaattgtgtaaatgtagggtttgtgagacaaacaacaatgattttcattgcaatatagctggggataatatttgtagaaattgttgtaatgactttcaattaagaaactttaaagatagttggagtggtttagtaaagctagttaaggatgaaatggaaatttataacattagcgaatgttgcctaaaatgcaaggggttaatgagaaatcaaagggttgaattaacaggggacggatcgataataaattatggctacaatggcaaatatgtttttaatgatatggttgattcttactcgtataaatttttcaataagaaaaaaatagtattattagagtctatgaattcactagatataactggagtatatgatttggcggaaggatactatcttttagaagaatatgaaaaagcaatagatttattagaaaatttggaggggaaggacactgatagtaaagtgttgttactgctaggaaaggtgtattttcatgccaataacttacaagctgcaatagattgtttattaaattctataaaaatacatggggataattcagagacttatcgtatactgggagaggtatatcaagcagataataatcttataaatagtgcatattattttaatcaagcaatcaagtattttaaaatagacgcgtatgatagaccaaatgattattttccacagtattcatatcttggattagcagtagtatattctaagttgaatcagcataatgaagtaataaaatcagcggaaaaatttttagaatctcaatatagttgggataccttggtagaaatgctttatgagcaaagatccggtgaaaagaactatataggtttcggtggtttttttgcatgcgctactatatatgaattaatggcattgagttacttagagaaagagaatctaatgctagctgaaaaatatattgaccgtgctcaagaattaaatcctgaaaatacaaatattgcaacgaccaaagggataattataggtagaaagcataatgatgggaaaataagtgagtatagagagcaaattagttcattaagacagaatatagagttgagagctagtagtattaacaaactaaaaacgctaagaccagaagaacaagtcaaactgtttacgggaaatgaagaagaaagtgtgtggggtttcctggtagggaaaatatttgataatttaaagacaatcgagaatttatcaccaattgttacgccatctcagaataaagctgctgaagaggatagatatacggatttatttaaatcacatatggattctaatttagtagatacctttggttggattactcatactcagagtagaggtggatacacacggaaagagatgggagatagagggggaataggagaaagggatatagtaattcgttctcatcaaaataaagacttactaatgggtgaagctctaatattgaaagggaaagatactgcaagcataaaaacccatactaagaaaatttttggatatgatatagggaattgtaacttccacataattattaattggggttttagcgaaaagcctgattcagtctggaaagattatagaaaattagtaatttctcggcaagagggtatttatgcagtaattgaaaatggagaaacagagaatttatatccagggattaataaacaaggaataagaacattttacacgaaacattctacagatgttgagaatgaggttgctactgcgattcatgtgtacgttgatgtattaaaacaaatgaagcgtgaaggtgctgaattagcaaggaagaagtagaacgatgtgattagaagatttaataaataaaattcttcatcatattataaaactatacattcttgtttattagttagctaatagctatgaaaataaaattaaatatatcggtgtacaagaatgaattgatttagaaagtcctttgattttttaggtgcgaatgtatagcaaacatgaaattcctagtacattcgcacctagaattctcataatgtatgatggggatttatgatttttatacaaaatactttaataaataaaaatatttttatatttttgaatagaattaacgtatttgtgattgattttgagcacaaatcggtgtcgcacctcatataggtgcgtggattgaaatacaagatacgagaatttaatgacgtcacccacatgtcgcacctcatataggtgcgtggattgaaattattgttacacctttagagtatccgagtaaaaaagtcgcacctcatataggtgcgtggattgaaatacaatgggaaagtgttaggttatgcacgttttaaagtcgcacctcatataggtgcgtgaattgaaatgaagatagtagaagaaatcaaaaaaagtgtatgtcgcaccttaaataggtgtgtgaattgaaattttgttgctccagtcgttatgatcgtctttgcagtcgcactttatataggtgcgtggattgaaattaggagttattaatggctttagatgttagaccagtcgcaccttatataggtgtgaggattgaaattacctcgggtttatatttatctggaatgcccatagtcgcaccctatataggtgcgtggattgaaattttgcaactagctcaattgtttttccgttttcagtcgcacctcatataggtgcatggattgaaattacctcgggtttatatttatctggaacgctcatagtcgcaccttaaataggtgtgtggattgaaatataatatcacaattttgacaaaattcagtcatgattgcacctcatataggtgcttggattgaaatagtttagtagatactcaactagaagtatctatatctgcagtatctaatacaaaagtaaacagtataaaatggagggagattgaatgacctacattgctcatatacgcgagagtgacagtcaagtacaaacagtcgaagagcatttattaagagtaaaagaactagctgaaacctatggagaaaaaattggtataaaacatttagctggtttagccggtatgctccatgatatggggaaatacaccaatgagtttaaagaatatatattggaagcagtaaataatcctaattctccacctaaaaaggggagtgttgaccattcaactgcaggggggaaattgttatatcaattattccatacagaaaatatgattccttacaaagggataatatctgagatagtgggaaatgctattatttctcaccacggataccttcaagattttttaaatccagatttagaatcgccctatttaaatagagtgcgagataagcaattaagaggatttgatgttacacaacaattcttttttaaacatgtcatgaaagagaaagattttcatgagtatgtggacaaagctactgtagaactagaaagtttcctacttaaagaatccccagaaaatgctgaaaaacaattaatgtttttaactaaattcatctttagtacattaattgatgccgatagaacaaacacccgattatttgaagaagaaaaaagtgtagaatccgtaataaatgttgatgagttatttgagaaatactacgagagactcatgacaaaaatcaattctttcaaaaaacagcagaatgcaaatacccctattaacatgttgagagcagacatgtcagatcagtgtgatcagttcgctgagaggccatcaggaatatatacgttatctattccaactggtggtggtaaaacattagcaagcttaaggtatgcactaaaacatgcaaacacccataataaaaaacgaattatttatgttgtaccttttacaacaattatcgagcaaaatgcggaagaggttcgaagaatattagaggatgaagaaaatattttagaacatcattcaaatatagttgaagaagtgaatgagcatgatgaaaatgaagacggtgtggttagcatacaacaaaaattaaaattagctaaagataattgggattctcctattatttttacaaccatggttcagtttctaaatgtgttttacgcaaagggaaatagaaatactagaagactccataatttaagtgaggcaattattatttttgatgaagtgcaaaaagttcctgtttcatgtgtttcattatttaatcaagcattgaattttttaaaaatatatactcgttccagtatagtcctctgcactgctactcaacctgctttggactttgtagaacaaaaattagacataaatacggatgctgaaatgattaataaccttgatcatgtaattgaagcatttaaaagggtgaaaatcattgatcaagcaactaatgaaatctttaataaagataaactcaaaacatttatacatacaaaaatagaggaagtacaaagtatcctcattgttctaaatacaaaatcagttgtgagagatttatatacacaattacagagtcaaggattaaatatccctatttatcatttaagcacaacaatgtgtgcagcacatcgacataaaattttagaagaagttagagaatgtctcaaagaaggaagaaaaatcatttgcatcagcacacagttaatcgaagcaggtgtagatgtgagttttgagtgtgttgttcgttctttatcagggttagattatatagcacaagctgcaggaagatgtaatcgccacggggaaaagggcatacagaatgtctatgtgattgattatgaagaggaaaacttaagtcatttaaaggaaattaaaattggaaagaaaattacgaagaaaatccttatggatttaaaacataacgataaaatacatggaggacatattttatcaagagaggcaatgaagaggtattttaaagaatattatagagaatttgaatcagatttagattactttattccaaaactaaaaaagaacatgactgagttattatccgtaccaagaatagaaaatagctatcgtcgagcatatattcataaacatgataaaaaagatattccattatttattataaatagctaccagacagcggccaaacattttaacgtcattgatgatataaccacttcagttattgtcccatatgaagaaggaaaggatattatcgcagaattaaatagcaataattccattgaggatctgactcgattattacgaaaggcacagcagtatacagttaacgtattcaactatgaaaaagaaaaattgataataaatgatggactcgtatactatcttgatgggaaaattctagccttgaaggaaagtgcttaatgagagcgattttaagacagctatattttaaactctatctttgtttgagatagggtttttaatcgatgtttttataccacatcaaaagaattcttaaatttcatataatatataatcgccaaatattgatatagttacataggaggagtatcattaatttactagaaaaatatagaaaatgaaaatgaaaaaggaggaagaatctttgcggaattctattgaatttgaggtttttggtgattacgcacttttcacagatcctttgatgaaaatgggaggagaaaagttaacttaccaagtaccaacttatcaagctatcaaagggattgttgaatcaatctactggaagccaactcttcttatgattgtagataaaataagaattatgaatgcaatcaaaatggaatcaaaaggtattcgtccaattgaatatggtggtggaaatacactcgcaaattacacatatttaaagaatgtaagataccaagttcaggctcattttatctttaatcatcatcgacctgatttagcttttgatcgtaatgaatataagcatcataacatcctaaaacgttcacttaaagttggaggacggcgagacatttttttaggaacgagagaatgccaaggatatgtggagccttgtgtttttggcgaaggagaaggcttttacgataattatggtggagatattcatttaggcacaatggttcatgggcttaattatcctgatgaaacaggtaggaatgaattagaagttcgattatggaatccggtaatgagagatggaattattcaattcatccgaccagaagaatgtacaaaaatccgtaaaatatccaagatggatccaaagatttttgacagttcaaacgttgaatcagttgatgagcttataaaacaattagaagaaggaggtgaataaatgagttggctattgaatttgtatgagacctatcaatcaaatttagatcgagtcggtaaaattgaaaaaaaatataatggccaagaatatacattgctacctatttcccacactactcagtcagcaaatattgaagttttaattacagaagaaggggagttccattcagcaacagtcatagataagagcgacgccaatacattgatcccttgtacagaagactctgcaagtaggtctggtaccggagcgtataaagttcctcatccattacatgataaattaacttacgttgcaggtgattttggtgaatacggcggcagtaaaaaagaagaggagtcatttggctattatatcgaacacctaaggaattgggtagaatccccatattctacagataaattaaaaagcatttacaaatacttaagaaaaaaacaattagtgaaagacttggtagaaaccaaaatattatggcttgatgaaaaccaaaagctgattggaaaatgggataaaaaagttgaagtttttctggggaacaagcccgaaatctttacagtgcttccagctggccaagaagccgcgtttgttagatttaccgtgtattctccaaataagatgctatcaaaggtatggcaagacaaagaaatacataactcctttattaatttctatgatggcctcctagataatgaagattactgctatgttacaggggaaataaaaccgagtactgataaacatgcgaaaaagattagaaatgccagtgatcaagcaaagttaatctcttcaaatgatttaagaggtttcacatttagaggaagatttactacgtcaaatgaagtagcgaatattagctatgatgtgtcccaaaaagcacataatgcattgaaatggcttattaacaagcaaggaaaaattatcgatcaacgtgtatttcttgtatggggcaatgatgcagaagatgttccagatattgtagaggatagttacagtatattttctatggatataagaggaactaaaaagcgagaaataaaatcctatacacatgaacaatttgccaatgaagttgctaaggcaattgatggttataaaaataatttatcttccagtgaaaatgtaaatattctcttgcttgattcagcgacaacaggtagattagcggttctttactatcgtaatatggataaaaacctttatttaaataggttgaagaactggcattctacatgtgtctgggagcatggttaccgtaaaaatgcagataatgaatttgttaaattttatgggacaccgtcaaccagagatattgcatttgctgcttatgggccaaaagcaaacgaaaaagtagtcaagagtttgatggagcgtatgcttccttgcatcatagatgagagaaaaatccctttcgacattgttagaagtgcctttcagcgtgcatcaaaccctctatcaatggaaaaatgggaatgggaaaaaacattaagtattacatgtgcattaattaataaaatggagggatatcaattggtattagataaggaaaataataatagagattatctcttcggacgccttctagcggttgcggatgttttggaaagaaaggcattaaataatggtgaccaacgtgctacaaatgctaggagatatatgaattccttttcacaacatccggaaagaacatggaggaccattcaaggggccctacaaccgtatcaagcacgtttaggggagaaagtttggtattataacaaattaattgatgagattggctcaatgataaaaattgaagattttaataataaaccactgtctggaaaatacttgttaggcttttatagtcaacggcatgaattgtatcaaaaaaaagaaaaaaatgtttcactaaatgatgtagtaaatattggagaggagaattaaaaatgaaaactttagatcacaaaatcgattttgcagttgttctatcagttacaaaagctaatccaaatggagatcctttgaatggaaatcgcccaagacaaaattatgatggacatggtgaaatctctgatgtagccattaaacgaaagattagaaatcgtctgcaagacatggaagaatctatttttgttcaatcaaatgacaggaaggtagaccaatttaatagtttaagggaacgagcagaaaccaatgtagatttagtcaaagcgttaaaatcgaaggataatccacatgaacaatttgctgcaattgcatgtaaagagtggattgatgtaagaagctttggacaagtttttgcctttaaagggggagctggaaaaggtgtctctgttggagtaagaggacctgtttcaattcatacggcaacgagtgttgatccgattgatattactagtatgcagattacgaaaagtgtaaattctgatcttggtaaggataaaggtgctgatacgatgagtatgaagtatcgtgctgattttggagtatatgtcttttatggaagtattaatacatagttagcaaaaaagacaggttttactaacgaagatgcggagaagattaaaaatgcactggttacattgtttgaaaatgatgcatcagcagcacgccctgaaggaagtatagaagtacataaagtttgttggtgggatcataattcaaaacttggtcaatactcatctgcaaaagtacatcgtttattagaggttaaacggaatattgacgagccaaaaacaatcgatgattatactgtattggtacatgaattagatgatttaaaagttgagattattaatggaatgtaataaaaagcgtcagaatagttgaaagaaagtattcttataaagatatactctatcaatttattaaatgaaagtcgcatctcttgcaggtgcgtggattgaaatgacactatgagaaacatcgattcaaacggtatcgtcgcacctcatgtaggtgcgtggattgaaataggatatggaagaatcaatttttgttcaatcgaagtcgcaccttatataggtgcgtagattaagactggtaagataattgatagtaatttagtgtctctgttggagtaagaggatctacttcaattcatacgacaactagtgttaatccgattgacattactagtatgcagattacgaaaagtgtaatgtctgagcctgggaaagataaaggttcagatacgatggggatgaagcatggtgttgatcttggagcttatatattttatggaagtattcatatgcaatgagcaaggaagacagattttaccaaaggtgatgcggaaaagattaaaaatgaactggttacattgtttggaaatgatgggtcagcagcacgccctgaaggaagtatagaagtacataaagtttgttggtggaaacataattcaaaacttggccagtactcttccgcaaaagtacaccgtttactggatattaagcggaacattgacgaaccaaaaataattgatgactataacattttggtaaaagaattagatattttaaaagtggctattattgatggactgtaatgaagaaaacgttagaataattgaaggaaagcgtatttattaaaaagttaatcaaccatttattaaagaaaagtcgtacctcttgtaggtacgtggattgaaatcattggcggtagttcataagtaacaacaaatggatgtcgcacctctagtaggtgcgtggattgaaatatgatattcaaagagcctgaacaagtggaatcgagtcgcaccttatataggtgcgtggattgaaatataattgaatatgagctgccgccgatggaagggacgtcgcaccttatataggtgtgtagattgaaatatggaaatggaacgttcttacggatcaaaagaagtcgcaccttatatgggtgcgtggattgaaatatgtagctggtattaatgctttgtgaaaaacaagtcgcaccttatataggtgcatggattgaaattaaattacttgctgccttatctagattactttcgtcgcatctcttgtaggtgtatggagtaagactgataagataattgatagtaatttagtgtttttgttggagtaaggggacctacttcaattcatacggcaactagtgttgatccgattgatattactagtatgcagattacgaaaagtgtaaattctgatcttggtaaggataaaggtgctgatacgatgagtatgaagtatcgtgctgattttggagtatatgtcttttatggaagtattaatacatagttagcaaaaaagacaggttttactaacgaagatgcggagaagattaaaaatgcactggttacattgtttgaaaatgatgcatcagcagcacgccctgaaggaagtatagaagtgcataaagtttgttggtgggatcataattcaaaacttggtcaatactcctctgcaaaagtacaccgtttattagaggttaaacggaatattgacgaaccaaaaacaattgatgattatactgtattggtacatgaattagatggtttaaaagttgagattattgatggaatgtaataaaaagcgtcagaatagttgaacgaaagtatccttataaagatatactctatcaatttattaaaggaaagtcgcatctcttgcaggtgcgtggattgaaataaagaccatttgaccgagaatgatagaagcagggatgtcgcaccttaaataggtgcgtggattgaaattggttattttccattcgtgttttatgctcctctgtcgcaccttatataggtgcatggattgaaattttaagtcgtatacaacagtaacacacaaagaatatcgcacctcttgtaggtgtgtggagtaaggctgataagataattgatagtaatttagtgtctctgttggagtaagagaacctgtttcaattcatacagcaacaagtgttgatccgattgatattacttgtatgcagattaagaaaagtgtaaattctgagcttgggaaggataaaggttcagatacaacggggataaagcatcgtgttgattttggagtctatgtttttttatggaagtattaatacacagttagcagaaaagacaggttttactaacgaagatgcggagatgatgaaaaatgcactggttccattgattgaaaatgatgcatcagcagcacgccctgaaggaattatagaagtacatagagtttgttggtgggatcatatagttcaaaacttggtcaatactcctctgcaaaaatacatcgtttattagaggttaaacggaatattgacgagccaaaaacaatcgatgattatactgtactggtacatgaattagatgatttaatagttgagattattaatgggatgtaataaaaagcgtcagaatagttgatagagtatcttcttataaggagatactctatcaatttattaaaggaaagtcacatctcttgcaggtgcgcggattgaaatttttaaagccagccttccaacccaaaaagttagtgtcgcacctcttatagttacgtgaattgaaattgctagtgctaaacgtctaaaggaattgtatgggccgtcacacctctagtaggtgtttggattgaaagtggtaagacacttgatagtattttattaagtctaacgcattaaataccttttgattaacgttcttcacaatcttgagaaagaaggagtcttttggtaatgcgttaactttaattaaaatttcttgaaatatataacgatattatataatatataggtatattgttagtttaattgattccgtttattcccacaccttattgtgttgtggttgagttgtagaagcaagttgcgtcttgtttcaattttgaaagggcttctttgagccgattagtgtatatatagcttattttgctatacacattattaatcgacttgaagaagctctttttgtgttgttttcaagttcgcaggcggggccatgtatcaaaatatagcaaattaaacagttaggggagataaaacaaaatgaaaaaagattgtagacacttacgactagtaccaacagtagaggagcataaaacacgaatagaggcaaatgagacatatcaacagaagtcatatgctacatctacaatgtcatctgaaacaagaggaagattaaatcaaatgcgaggttgtttcgaggctgaaattatattaccagttggtaaatttcaatactttaaaccacatgctatgaatgaaaaagaagccattcaagaaatcgcattatttattgaagggatacaggaaatgaacataggctatgttatcttatggcgctttgttgggcaacaaagtttttatagtggtactaagatcgtagccgaaccaaagtttcgtaaaatcatgcgtaagttgaaagattatctttttgactacgaagaacttatttatgaaacagaaaagtaagaaggatagagggatatagatatgaaaaaagataagatttggacagtattagatgatccaaaagagcaggaaacaaaagagcaatcccaagagccggatgatatttttgctggtatggaagagctatcggagattacagatgatgaactaccattttaagcaagtcgaggtagtttatagagggtaaaaggaagaactaagtgatgtatatacttggatcttcctttttttattgcaaaaagaactttggagggaaatatataatgcgcataggtaacgatttagcggcgggatattatccaacaccactattagaagggaaacacttaatacagttattacaaatggaaccagagcgagtttatgcttgctttgatccatgttgtggagaaggtacaattttacgaagttttgcagatgaggtgagacaggttagcatacaaattgatacatatggtgtggaagtagatgcaaatcgatatggaaaagcaaaagagcaattagatgaagtggtatgttcggactttgaaagtatgatgattagtcatgactactttccgcttatttttttaaatcctccttataatacggagcttcgtacagaaaatacaaaatcagagaaaatggagttcaacttcctaaagcgtgctcacctttatttacaagatggtgggattatggtgtatgtcattccatacgacaaatttgctagggacgatattagctattttatagcaaaacattatgaggaaataggattaatgcgttttggcgatgaaaatgaagaatttgagcaatttaagcaatgtgtttttattggccgtaagcgtgcagctacgaagaatgatacatatttcaatgatcgatttgctaatttttgcgaaaatatgtctgacctttctttcgtcaaaaaacatgtaaatacattagcagaaatggtaaatcgtaaggactgggctataccagaattgcgtcatcaaaacaaacttatttttacatcacgagtggattataaaagtgcttatgaaggagttgggaaatcggaaggtatctcgtcgttcaaaaagcgtttaaatagagggaatggttactcacttcaaggtgagaaaacagctgctgaaagagcgaaaatgccgattgcttccggacaattaggactattgctgataacaggtgtggcagacggcttactgggtgaaggagatacactccatgcggtccgtggatctgagaatgtgtattatgaaacttcatttgagccacttcaaaaaacaacgaaagaagttgttttacaaaaacgccgcgcgaaatttatcatcgcaacaccgaccggtgaagtcaaagaacttgtctaggaaaggaagaaggctatgtctgtactattaggaataggagcattatttatcgtatgggaatttagtaatcgtatgtttcgtattgctattgtacttacagtcatttgtttatgtgcttctcaattaggtgcaggtacatatttggaagtattagagcaattctcagcgttccaaggtgcaggtaatatgctacatgcggctgaacaatcattaccagagtggaaacagtttatagatttttagccaataaattgaatgagtaggacatgagacgtatcgaataagatgcgttttttattttaggagggaaacttatgatacaagaaataattcaacaagatacatttgaccaggaacaaacaccagcaatgttgcaattggagacagccgttgcctcacatacagctttttgttttgcaatggcagtaaatcgtcatcaacaaatccaatttgcagtactaggtgcgaatgacagtacattaaagtcattccgtgctgccatatcaatgggaactaatcgtttgtattttggagagggaaaaaaagaagaattacattacattttagataaaaaagtgaatgtaaactcaaaaggtcagtttgaatttattaacacacaaacagcaaataagaagaaggcaattattgcattttctagagaattagaagaaaagtatattgttgcaattgacgaagcgccagagaaacaagtaagggatttcctaatggctcctccgtatggtttaccgatcttagaagaatgggcgaggccaatttatgaggagatgctaacaagagatctattacaaccgttagaggtgtattttgataagaatgagttttcttctctaacgattgcgcaagtcttactaaaagaaacggattgtaaagagtttttatcagaaatgatacgctctgggaaatgtcaatttccgcaagaaggtacaggtgaaaaaatcaatgaaattaatgatttaaatgaatacctattggaatattcacctgacatgcttgataaggttacaaaattggatgagcccttacatcaaccgatgaaagatcaggcattatctcattttgatacatatcaaagaccattattccctgtacaagcacatgtagcaacaggtgtagcaaaagctttacaagtacaaaagggaatcatcttgcagggggaaatgagcacgggcagtgcggcacgttccgctataagtgtagcttaaacacgaaaagcgggggccaaatcttattaagattggttacaactctttaaacgatttacagggtgaaaattccctgtcatgactaatattccaattcaagtcatgtctatgagactcctacatgcgcctatcattccaatgtgataggggtctgaagctaggtgaagccgtccttgaagcgaactcgttaaacgtggatttagggcggtaggctttaaaaacattctatgatgagcgaaatcgaaccctcgtatgtacgctccgttactcattccccaatctaataacgagatatatgattgggtcttgcgtgaagatatttctctcttgcctgaggagaaattgcttatataggtctttccagagtttatataagattcatgagagttaggaatagtctactcatgaacaagtagcgtcggagtatagagggcatctaaggaatgtaaaagaagggctggtttaaagggaacgtgcgagagccaataagcggaggtattggagcctatgaaacttattggaagtcagcgacaccatagtacctatgatgaatagccgtttgtatcttgctataagttgcttctgcaacgaagtgtaggagaggagagaaactattctagggaagggtgttagtcgagaagtattgcactaattgaggaaatgttcaaacgaaccatgtgagagtaaaagagttaattcatttcggatagtccatttctctaatcaagggggcgatccatataaaaatgaaggataataaacaatttccacaaaacgaaaaagagctaaaactagcactcgatagcatgtaccgaatagccaaagaaagtagtaaacctttctataacctaattgaacttatgaagaacgagcagactatactgaccgccattcataatatcaagggtaataaaggaagcaaaactgctggcactgatggtaagactatggactactatcttcaaatgggcagagataagttgatgtctctaattcgtaggaacattaataactatcaacctagtccagtaagaagaaagtacattccaaaatcaaatggtaagcaacgtcctttgggtattcctaacatgatagaccgcatcatacaagaaatagccaaaattgtcattgaacccatagccgaagctaaattttatcattatagctttggtttcagaccaatgcgttcagctgagcaagctattgctgaaacacttgaacgtatcaggagaagcaaaacctattgggtaattgaaggcgatattaaagggtatttcgataacatcaatcacaataagttgattgaaataatgtggaaaataggaatccgagacaaaagagtgcttatgatgattaagaaaatgctaaaagcaggaattatggaagaaggaaaggtcagagataacgttagtggttcaccacaaggcggtatcatctcacctcttttggctaacatttatcttaattattttgattgggagattgctagaatgttccaagagcatccagctagatacaaggtcaaagacgtttctagaaatggactacaacgtgtccgacaaagacatgaagatacatttctaattcgatacgcagatgactgggttatcctttgtaaaagcgagggaaatgccaagcggattctcaaaaaagtggagaaatattttaaccaccaattgaaactggagctgtccaaagagaagaccttaatcactgatgtgagaacgaatagagtcaatttcttaggattctggatttttgcagaagaacatcggcttagaaaaggcaacatacaaggaaaagctatccctaacatggataaagccaagttgaaaataaaggagattaataaaaatattaaaaccctttatgaccatcgtggtaataaatccaaacaggttgccataatcgagagtatcaactcaaagattgttggcatagcaaattattataaaatcgccaatgtatctactatatttcaagggtttgacaaacgtattcattacgcccaatggagaacatggttgtttatgaacaatcgacgtggacgatattatcaactaaccactccagcggatactctcttaaatagaagagatagacacaaagagcaaaaaagtaaagtattcttcattgaagaacatggagctaaagtaggaatcaccaaatttgcatttacgccaaaacgtaatgcgatgaaagtgaatctcttaatgtcgccctatacagataatggccgaagtatttataaacggacaaccggcaaacgtgaggcactagaaagaccgaatttcttccaagaagagattcctttctaccaactcaacaaccgttatccgatatataactttgaattctatctgaatagagaatacgcatttaacagagataggggaaaatgtaactgttgtaaggttcagctaaatgaatggaatcttaacacacatcataaaaaccctaaactaccgcttaataaagtcaataaggtgataaatctggtttccttgtgcaaaacatgccacaagctggttcacaacgaaaatcccgttaccaatacaaaaggtggaaagaaaatagagcaacttagaaagttgcttaaagaggttaagtaagtacggctttcgaggataaattaactcttattcgtatttgaacaaattagtgtaatggcggttatagtcgtaatgctataacagtctttatggagaactgagacaacagtttgaaatatggtttcccgatggaacgccgtatgcggtgaaaatcgcacgtacggtgtggggcgggggaaaaggtggagattacttcaaagtcttacctatcgcacccgaaatgggtagtggctacctcaatccttacggattgagatgccacacataaagcgcaatgatgacagctgcagtagatggctattttcatttaaaagggaaaaaaggatatcgtacatgcgtatttgttccaccaactcttactgagaagtgggcaaaagaagaaatacgacacttattaccagacgcagagatacaccttattaaacgaactgaggatcttattcgtattcatcaagcttggattcaggccgggagaccaaaaccacaaaaaccaaccttctttgttattagttttacaacaatgcgaggagattctatcaaaatgatgccattatcttataagcagactcctctttctaaaaaatctgaggaagaggtgcaaagatattataagaatggctactactgttcggattgtggtgctaagttacgtaaaaaaacatcttctatcatggttcaacaggccaatggtgaacaaaaagaagtatgtcaatataaagattttacagctagtgacttagatactaaaacgaataaaaatagtgtatgtgctgattgtaattcaaatatttggagcccaaaagtaaaaacaaaatatgcaagttttaaagagtggacaaaatatgaggaacaattagtgcaggcaattaaagagggaaataaacctttacaaaaacaactagagttagagaatcgtgtaaaaccatatgacgcaaaacattcaggaagagcgtatagaaaagtagctgctgttgagtatattcgtagaaaaatgaagcatttctttgacgttcttattgctgatgagatacatgagctgaaaagtgaatctgcacaaggaactgctttaggaagtttagcaaaggtttgtaagaaagttgtagctggaacaggtacattatttggtggccgcgcaagcgatgtattctatacgttatggcgtttattccctcaaaaaatggttaaaagtggttttgaatacagttctttcatggaatggaatgaaacctacggaaacatcgagagaacatattaccatgatggtgaggtcacatctaatatagcttcacgcggagcacaaggtacattagataaaactaaggttgtacctggtatttcaccttatgtgtttactcaattcttaatggatacaaccattaatgtacgtcttaaagatgtatggccaaatcctgtggaactagtcaacgtccctacaattcttgttgatatgtctgaagagcagaagcaagcctatgagcatatgaaagagtcgtttgaaaaagcaattgaagcagcgaaaggtacaccagacgctgggaaactgtggctttcttatattcgtacaggtaatgcatatccagacaatatgatccattatccgaactattacttagatgatgcaggaaaagaactggtttggtctaatgataaattcaaatttgatgaggattgtatacagcctaaagagagagagttgcaaagtatattgcgtacagaaatttctgagggccgtccaaccatcgtatacgtatgtgatacaggatctacagtaaaagaacgagacgttcaaccacgtttacagaaggttgtagagcaaatatctggtgcgaaagtagctattctccgtaccaatacagttactccgccaaaacgtagtgaatggctaaaagatcaagtgaatagcggtgtgaatgtaattatttgctcgctagaattagtgaaggtgggtcttgatttacttgcaacacctacattgatattttatcaattaccatttagcttattcgcgttgaatcaggcagcaagaagacactgtcgtattggccaaactaagcaatgtaggaccttctatcttggataccgagaaacgttccaacagcagatggcgcaattaattgctcaaaagaataaagctgctgaagcaatgaacggtgaggttacaagtgatggtctgaatgcaatgcttggtgatactggagatctacagactctattaattcaaaacataaagagtggaaatcaattaaagggttcaacagaggaatggacaaaagcagcatctgatgaatcgaagcgggttcttgcaaatatcggtaatgtgattacacctgtgtttgaatcaattgaaattcaatttacgaactgggtgggaaaattaccaggaactatggatgttgcatttatgaaagaagttcaatttgtacaaagggctgttgaatgtattaaaaaagaacaagtacctggagttcgagtgaagaagaatgtacttgaaatagctggagaaatagaagatgtcattcgagctttaacaacactgaatactgataagcgtatgcttgtacaaaaacaagatatcacattctgggattcagttattgttgaagtggattcttctaaaaagaaaggaaaacgaaaaaacaaagtaattgatggacagtttgagttcgatttatttggataatcgagaggggaatattatgtttacaaaaatatttattggtctattttgttatgtgtttttggtagttcgtaattcaaagaaaaaatttctaatggaagaagccaagaaaaaagaaatggaaaataaaccggtggaacgccccgtttattggtgcccaagagaaaataaacctattggaagggaacaagagcgtgttactgttccaacaaaagagatcaccttagaaaaagatgtagcaagtatatatgatttagttgctacatctgttcataagaatctgggtgaggaagagagtgatagattaaaacatgaggatatagaagaagtggagtatgctgaagattttcatcatactcccactcctgaggctgtatatgatattccttttccaagtgatgaggatataccagtggaattattagaatatgaggacatgtatccacaacaagaatatgtttcaattccaccggaaacagaacacgttttttctgttcaacaaggagtagctgatgttgaagatatggattttgtgaggtggactgcaaaagtaatagaacaagaacaaggactgacacgtgtcataaatatgtctaataagaagcgttattggattcatacagagggagaaatattaccgaaaaatcaattactgtatatgaaattagaggtcaattcaccttattcttatacactagttgaatggagtaatagacaactagggaatatataaatctatttcctagttgtattttcttagttaaatagcatcaaatacagcattttctcactcatttgtacaagaataaaacatttttttatttttgtacaaatgagtgggacagaatgattcaccatataaggatattcgactataatgatacattgtacgtcattgtaatattgaaatgttttgagattcaagtgattaacagtcttaaaacaggagaattgagaactcttcgtaatattacaatgcttaaaatagattaaatccaaacatgaggattatatgaagtaaaaaatatttttgagttaaaaaaataacaattttgaaaggtgaatgtaaatgaatattaattccataagtaacaatgtagtagaaaaattagaacaaacggtgcgctatgaaaagaaacaagtccaggtattacgtgtaagtaaaagtagttctaatatacacgcttacatgatttttccggaattctcagaggttaaaatttcaaataccgaactggatgaatatatagaaaatctgtcaacaagcgtgaagtatgtcattgatcgcaagttgagtcaacaagaaattgaaaaacaaaatcattctttcattatgacgtgtgaagtcgaggaagatggtgtgatagatgatgaaacgattcattttaatacgacgtatgtaaaaccaccaacaattgcaaataaagtatttaagttggtatgtggattagggaatcgcttagatagcttaaaagaactacatattacagtgttaaataataatattaaccgaattgaaattgagttttacaatgaaaatgaaacatatgtggcagtagaaaaagaagaaattgcaaatgcaattatgggggcatatacaaaagcaaatatctattatgcagcagatctttattatgctgcagaaggaaatgaaattaaattaaagagcatcaaaccaaaattagcgggtgatgtgtgatgaaacgagaaaaaggaatgataggagtcttatgcacgcttgttttgatgattttattacttgtacccttagaagcagctcaagcttctgtaaaagtagattttaatgagttaaaaggaaatgatgtttcgtcatcatttaaagatggactaaacaatcgaatgaaaacaacagagaaagaagattcatttggatcatcaatcattcaaaagattgaaggattgtatgcgccggcttttaaagtaggagtcaatatcttttctatttcattcgtattaggagttattgtcatggttatggcattaattacaaagaatggtcaatggatgaagtgggcaaccggaagtatgattttctcatttatcagcatgatgtcgatgagactaagtgtatacttcttatttagttccgatgtattttcgtttatgaacatctttacggattttttagacctgtttaaagcaacagcacttattttcacaccatttatgttaatcgcaggtattcgtttaagaagaattcatgagagtacaaaacagccggaatattaccgttgggccaaccgtgtcataacgggatcttgtttgctgtgtatgttagccgtactcgctccatggctatttgctaatatgtaaagaactatatataaaaatagaaaaggtactgaatctacattcagtaccttttatctacccattaggttctttctttcatattcttcaaatacttcttctgatattggcgatagtatgccacttaaatacacagcggtatataaaaagtattggccatcatttgtttttattgtatgagtaccgtgttcctcattgtttggaataattcgttcaattttgagttgctttttatcacaaatgatctcttttactctatataaattatgtgttggtaaacgattaatatacaaacaaaggtattctagtagaaatagaataacagtcatttgtagaatgaaagcaatctttaatagagttggtatggatgcaaataatactagaaatatagagatcaagaaaatatttaactttgaaaaccatttttcatgttgatttaaagaaataatacttttcttattctgaaacacctggaacctcgttataagaaaaataattacaaagattccttcataactaaaccaggttttccactccgtatcagtaagttctagcaatatatatatgataccggtagatacgatcagtggtaccagctgtaccaaactaaatagtatggtatgttctaacattcttttcttgtagatacgattagtaattgaatccaagtttcttaactccttctgcaattttcatgatgacaccaccaataagaagatggtattcgccaatccctttttcatttacgtaccaacacatatagtgtcggataccttcttttgcactatggtcatgtaaaggaaaaggagatgcgtattttttagatgacatattattatcaccgaaaggtacctgttctgcaagtgcaaaacgtttcttcgaatcatttataatccaacaaccatagtttactgatccataccatattgcgtctttgtgaattggatcaatagaaggttgtgctggataactttcagctagtatttgcgctttttcttcacgaagttgctgatgtatgtgtgaatttaatggatcttccgttccgatttcataggtttcctcaaaattcccacactcataagggataaggggattatttgaatcagctgctaattgtagactgcaagaatctgattttgaaagatagtatacacagtctttgcaagtgaaaaagtttgaaaaagctgaatctgtttcttgttctgttacggtattatctactacaagttttaacatgtctatcacaatcctttttaggctagttcgtaaattaatatagacgtatcatatcatgcttataaacaaatgtaaatattttccaaataaaaataaccttattaattttgaaaggactgtttgtattgaatagaaatcgagaatatattgctttgcgaaattctatattaataggctggttactgacaggcatcgtaataggcctatctatccatttttcttctgttgtttatttattaattggatgtttcattctatcgttaaaatacggattaatgggtaccgtgaaaaatgtggaaaaacgtttgcctacctgggccaactttggcgtcattgaaaaaccagttaatagaagagtaaccagaccttttcagtttcgaggtgggctccttgtttcattagcattaggattcgtagagatggtgataaaaggcttatgtatctcatattttattttaggattagaaacgcatgtatatcgtttaatgcgcagaaacgcaagggtgtaaaaaggaggactctattatgaaagtattgatatttgaattgattcttattgcggttctaataccgttgaatagtgttgtgaaaaaacatgtaccaaaatggaaaggaaaagctggagagaaactggtaaaacgtatactaagtaaattagatccaaaaagttactttgtgttacataatgtgacggtttatacggagtatggtgatacaacgcaaattgatcatattgttatcgcggaaaccggtgtatttgttgtagagacaaagaactatgaaggatggatctatggaaatgagaaatctgcaaggtggacacaaggtatttttagaaagaaagcctcttttcaaaatccatttcgccaaaactataaacatataaaagccattgaatgggtgatggaacaacagctgccatgtatctctattgcagcgttccatccaaaatgcagtctaaaaagagtacatgttcattctaaagataaacatgtactatattataacgatctacaaaaatgtattgaatcatatactgaggtgcaactaacaaatgatgaggtccaacatatttatcaaactatgttgcgagcaaacataacggataagggtattgaaaagaaacatgtgaagtatttaaaaaataaatttgctaaacaataagaaatggagatagagacatgttatatgtagtagggtttatcgtaatctctatagtagctattcggcttaacatgaagtattacaagcttagggggaattttaaagattttgtaatgaagaaaaaagagtagaagatttctaataaaaggttttaaagtccatttcaattgaaatggactttagtattcgcataaggttaaaataaatcttttttattatgaaaatccccaagaatgttgcctttacatttgagggaaacaagaaagaaccctatttagataaaaaagggttctttcttgttttatgtagcacttattaaaaagaaaagccatgttataaaaaatgctacaactaagggaattatttttaaaaagattaataggtttttatttaagtaggtgtatttttctttgttgaaaatatattctagactaactgctatacaaatcaggatcagtataattaaaattgatttcttgatcagtaaattaggtaccaaattatataaactaagacctaagagtacgattatagatgcaaataatcgaatgttttttttcataaatcgttctccttttcaatttattagttacggtgtatgtgtgggtgtcctgtccacgtaattccaactgtaacgccttttcctttgttaacaacagctaatgtagcagctccaagtccaactatagccgcaattaatcctaatgggactgaagctggtattgttacatatccagctgctgctaattcggctgcaacccaaattgctgcactaccccatgccattgcttcagctagtgattgagtttcagaattacttagttttaatccgaatccccatccataaaaaccagctgaagaagattgtaattctttgaattggcttaggtcattattaacatatgaatttagtgtttgtgttgtggaaagttttccagggtttccttgttcatctttttctagagtgaaatatccttttttaatgtattcattttctaagtttaatccatttaagaagttttgatattcctcatttgttataccaatttcatctgctgttgcattaatatataaaagtccttctgcatttacttttacatatggagtaaatgtttttgttgtgttaagtgtttaattaaattgttcgtttgtttgaatgggaataaatttattactttgattttcttgtacttgctctgtttttactgctgtttgtttttctgttgcggcttgagaaatgctaggcgataggctaccaagtaataatgcaccacttaaaactgctgaaatctgtttaactttcattataaaaccacctttttattgtaatttggaatattttagattcctattacattgtagtttatatttgaaaatattgtaatattttgctatcaattggaatgttatgttcgattaccaaacccttacatataaacctaattatacaaaaaatgacagaaagattttttgtattcctagaatctcccactttttgaaattatatatatattcatattatcatgttattacactaggttaaattttgggtaagttgatatattaaattctgaatattttatttgtattattgtgtattatatacggaggtgcaactaacaaatgatgaattgcataaaggaagtattatgctataattgaattaatccaatactaaaaaatcatattgcaaaaggacacacctacgcataaccatagcgtaggtgtgtccttttttgtttgaggaggaaaaatgtatgggaaaaacgttatttattgcggaaaagccgaaagtggccaatgaaattatgaaatcgccacgtttccgacactcacaaaagtacattggaagcaaaccttattacggttattacgaaaatgatcattatattgtcagttggtgccgtggacatttactggaactgaaaaatccggaagagatggatccaaagtataaagtgtttcagttagaacatttacccttaatttttcaaccatcgtataaggtgatacaagaaaatgcagagcaactacaaatccttgttaaactgttacagcgacctgatgttgaccatgccgtgaacatatgtgacgcggaccgcgagggagagttaatctatagggaagtgtacgaatacgcaggtgtgaataaaaagcaatctcgcgtatataaatcctcttttgaagctgtagaactcgaagcagctctcaatcgattagaaagcgcgtctaagtatgatggactagcttattctgctaaagcaaggcagtatttagattatctattagggatgaatataaccaggggatgcaccacaaaattagcgcaaaataaattcctattggcatctggccgtgtacaaatgtgtttgctacatgagatccgtcaacgtgagttagcaattgaaaactataaggaacagtcttattatcatctgcagctagtaacaaatttaggactcactccagttatgaaaacagaagatcaggtgttaaacccatcgccattaaggagtttaggggagaagctaaaaggtcaatatctcacggttgaggaatttaaagagggcactaggaagcaaaatcctaaattgctatacaacttaacagacttgtacaaagatgcccatgcacaattacaaattaatgctgaaactgcaaaaaaatacattcagaacttgtatgaagaaggttttataacctatccacgctcttcgtctaggcatttacctacagaacaagtggaacgagtaaaaggtgttatgcaggcgctagctaagagtcgttattctttactggtacaatccgtcgatattgacgccattgatataaaacacaaaacatttgatgatgatcttgtatcaagccattttgccattataccgacgactaaacaatatcaagaggaaggtcgtccagagattgaacaacaactatacagtctcgtggtaaaacgttttgtgggcaatttcatgcgtcctgcagtgtacctggtaagagatgtatcccttattgatgcaatgggaaatacctatcaaataaaagaaagtgtgcttcgagaaaaaggtttcctagaagtgttccaagaggaagtagaggaagaaagtgtggaaacatttaaagttcctatcctgcagaaaggacaagaacttcaaatctatgattttgagttgctggaatccaaaacaaagaaacctgctctacacacagaaagctcaattcttgcttttatggaaacggctggtcgtaaaattgatgatgaacatttaaaagagctgatgaaaggaaaacgaattggaaccgtagcaacagaagcggcttttattccggctttacacgagaagaattttatagacattgaaaagggaaaaattattacaactccaattggccgtgcctttattgaacaatttcctgttcagcaaattaaagatccactgtacacagcagaaatggaaggaatgatacaccgtattgaaaagaatgaaatgagttataaagacttcattgtacaaacaaatgcgtttgtacaaaaaataacacaagagattataagaattcctgatacagtttcgtataatctaatagaaacctggaagcaacaaatagaagtatgccaatgcccttgtggaaatggaataattttagatagaggaaagtttttcgggtgcagcaatcatccgaactgtaacattggcttgcctaagaaaattaaagacaaaacaattcctacagtgcaagtaaaaaaactgtttgaagagaacaaaacggacgttataaaaggatttaaatctaatggcaaagagttttctgcttatctagcatttataaatggtgaagtaagctttaatttgcctacagttgaagaattatcgctaggtcagtgtccaaagtgtcaaaagggacacattttaaaccgtgataagttttttgggtgttcagaatatcaaaacggatgtaattttgcgatatcagctaaaattaaagaaaagaaattatctgatagccagattaagaaattattgaagaatcgcgttactgacttcattcatggttttaaaggagagtacggagaattcactgcagctatccgattaaaagaagatcttagcatttgttttgaacgtccaacaacggatgatcgtactatagggaaatgtcctttgtgccaaggaagggtaattgtaggaaaaactacttatttatgtgaacattacaaaaatccttgcgaattcattgtgtctggaagcattttgaaaaagaaaataactagcgcacaagtaaaaaagttattagagaagaatatgaccgatacaatctcaggatttgaaagtaagaaaaccggagaaaaattcgatgcaaaattaacctatgatgtacaaaaacaacgtattacatttataatgaataaaaagaaataatatcataaaatcttaaatttcatatataaaattaataggaactatgatatgatgaaagtaacaaaatacttctaaaactatcttgcaaaaggacacacctacgcatacatatgccataggtgtgtccttttttatgtatttttagaatttcaagactcaaaagggggatatatattgtgtaccagtaatatagcatctgctaatgtatcttttgaaaaattgaaaagtcaggaagagaatgaagaaagtatggtgtcaatatgcccgcagtgtaaggaacggtcatatacagcactttataatgatcatccaaaatggatacagttttgcctatgttgtaattatcgagaagtaaatactatgaatagtccgtttgtttattagatgcagctatttacgtattttaagtaggaggaagaaatttcgatatgaaaatatggattaaagctatttgtataacatcattcgtaattcaaatgtcagcatgtagcagttccgtgcaaacaaaaaatgattcgagacctgcccaagcagtacaaaacggaatacaacagaacgtagaagggaaaggtattgttgatattccagaagcttataaagggaaattaaaaggcttagagaccgttaaagggaaggtattacatattaaagacggagatacgatagacgtaaacgtaaaggggcagaaacagacggtaaggttacttttattagatacccctgagtctgtatctaataaaatcccaccacaaaagatgggaaaagaagcctcttcctttttaaggaaacagctagaagggaaaagtgtaactttggtttatgatcgagggcaaaaagaagacaaatacggtaggaaattagcttatgtcttttgtgatggaatacacatcaacgaaataatgatcaaatcgggttatgggattatagcctatatttctagacctaatactacattgctaccagaaatgctagaagcagaaaaagaagcaaaagaaacaagggctggtgtgtggaacattaaaggatttgtagatgaaaagaaccgccactataaccgcaatgatgcagcttaatatcgatacttattcaaaaaggaggtccataaatgaatggaaacaaaagaaacatgttcttatctttttttatttcaactttctttatttttttgagtctcttgccgtttagtagtaatgaatatgtatatgttatttcaaaaatcggggctgcagctggtgtaataaatattgtgatgatgagcgtattcttatattttcagagcaaaaaaacgagacatctcttgagttaatatgatacaaataccagttttccttactcatacgtaaaagataagagtaaggaaaactgaaaggggaagttgaagatgagtcaaatgccgggggtcttgaagtttgttttagcaaaggaaaaacgatatgtatatttggttgtagcagaaaagaaaaacaaacgagtgaaaacacatgttgtatatggattcggtccactagagaaagcattagaaactatgtatggaatgcgtgataattttgagaatcgctttccaccagatttaaaagataagggatatgactgggaagatttaaatgattggatactatccatagaaacaggctattccaaatacggaaataagttagtgacattctaaatagaaaagtgaggtagtatcacatgcttgatacgaaatctttagaaccgtatttttgtttttctaattcaccaggtattcagtatatcggaacgtattgtccagattattctaaagatgaaaataaacatgtaaaagattttttgcgaaaactcatagattgcctttcgcatgttgaaccggcatacagccatgaaattatattaagatttttacaggatgaaacatatcaacaagagatactatcacatgcgaattttcagtccgcattcgatgaacaagcaaaagattctattattcatatgctagtaaatgagtctgaaataatagaaacagtaagtactagaatgaagcagttaataaacggagtaagaaagccgatggatcctgataagtatgttttactagattttattcaaaaggcaaatacatattttgtaccgatagacgatggacgtaaggagtatacaaaatggaactgatccgtaagtatcatattttctgcgcttggacaatcgctataagtgcaatgttgattagtttgttttttagtgaatggatgaagttacctccatgtgatttgtgctggtatcaaaggatggccatgtatccattagtattaatattggggataggaatgtacagaaaagatccgaacgtcagcacgtatgcattcccatttgcgtgtatcggcttaatgttatctgtatatcaaattacaattcaaacgtttccagctagtgagatgaagatatgttcagtaggagtttcttgtacagaagattatctgaatttatttggtttcatctcgatacctatgctatcatttgttggaattttagccatcatagtacttttatatattaaacctgataaagagacaaaagaacaaataacacagcgattataatcgatatactcatataaacacaaaatacttataacttaaaaataaaaaaggaaactaaaaaggagaaattaaaatgacaactattcaagcaagtaatgaaatgcacaaaatcccagaggcggatgtagaattattaaagattatggcccatccagttagattacaaatcgtgaaggagctagaacaccgcaagatttgtaatgtaacacaattaacggagctattaaatattcctcaatctacggtatctcagcatttatctaaaatgcgtgggaagattcttcgttcggaaagaaggggattagagatgtattatcatattgtaaattcaaaggcatgtcagattgttagtgtactaggtttatagaatagtcttgaacggtaaaacaagaacctcatttcatttttgggttcttgttttactatagttttagaataatagttttaatattttgaattttattgatatatattcaaaaatacacctattaaattacaaattctgttattatattattaaaagaaaatatgataattggtattgagggggtagattatgaatatagcaatcaaaggaaacgaacagattctgggcttattaaatgattggtatgtggaaattcgtgcacggcgcataagcaatgcgcatcgtttaaaagaagaaattgatggtaaaattcaaaatataaaagatcagaacttattattatactattcattattagattttcgtcatcaatatgtaattgataacttaggtgtttctacaagtagttttgataaagtagaatcttttgagattccttctaacaacactttaacttattattatcatttctttaaagctatccatgctagtggaactggtagttataaggttgcaaaagaacactttgatcaagccgaaaaattattagagcttatcaatgatgacgttgagaaagctgaattttattataagttaggtgcattccattttgatatttgtgattcactggtctcttttcagtacacaacaaaggcaaaagaaatgtttttagcccatgctgattatgaacgtaatgtcggcttttgtgagaacttgttggggttagcttgtataaacttaaaagaatggtcattagcagaggaacattttgcggccgcaatggacaagttccaaaaagtcggagaagataagtttattattatggtgcgccataacttgggttggatgtattctaaacaaaatctatcatctttagcgattcgttatttatctgaagtcgttgaaaattctccaaaccattacaaagccatgtatgcaaaggcattggaacattacaaactggacgagcgagatgtcgcagcagaactcattgaaaatggattaaatattagtaagaaacttaatcaagaagagttcatacatcgatatctcattttacaagagctaaacaatgcttcacctactcaaaagctcgaaaccgtagtgctagcaggaattgattacttcgaaagagaaggattgtatgaagatgttcaagagtcttatgagacgctgggaacaaaattttatgacgaaaagaatcatcatgaggcgagtaagtatttccatttagggttgaaagcgaaacgaaaattttttgaggaaggagctttaaaatgaaaaaaatagtattcagtttaatgggaattgtcacggctataaccttgactataggtgtgacgaatacagcgaaaactccacaatcttacgaagtaattcaaagtctttcagttggagatcacggtggttgatacactaatttaatgtataataaaaagggctaggatttatcatctagtcctttttttattgattggatgttttcataaggttcaattcgtaaaattgttaaagcgtatgccgtgattcgaggcctactacgtctttggttcaaataagaaaaaatacgattggggagtgaagagcaataaagaatcatatcaggagccctcagggacaactattgcaaatcaataagaaatggtctcacctaaagcaaaaacagcgtgaaaccatatcaacttggctgagagaggcttatatagagaagattaaagttcataaccgtagattgaaagcgagagaacatgaggatgttttagaaagggtaatgagtaaaatctatgatcgtaaaatttggattcctgattatgaagtcgaaaagtattacaagggaaaaataaatagatggtataacaaacacatttcattggatgaaaaaaatgataaggaggagaatatatgaaacatagtatcggaaatgtgagtacttcatatataatccgtctaattttaaatgatttagacggatttattacagcaggaaaaagggaatttaatttttgctcagaatccggagtatcctctgtggaggagctaatttctgattggttggagtggtttaatgattacccgcaaggtatatcgccagatgaattaaaagaaattgaaagggagataggtgaattgatggggagtatgtttatatggtctcataatattgaagaaagagaagggtttataaagcaatttagcgattatttcggagaatatataggtttttgtaaattagttagggatgtatatcttgaagagttgaaagatgagttgtcatattaacatcataaattcctaatattattataaaaagaaattaaaactaatgttctttaaataatgaaaaagttaaaggagaaaagaaagtgaaattagagattgaaaagtttattagtgaaatagaatttccggaagctgctatgggtcttattgaagagggaatattatgttataaagcaggagcttataggtcagcgtatatcatgtcatatttatttttcttaagtgtagtgaagcacagagcattagaaagttcatatgctcccattgggtatggtagggaacgaaagaagaaaacagacgaaattccaaacgatgaattctgggaaagaaaagtattcgacttaattactacaggaaaatcacatagttgttattttgaagttagcgaattgataattacacaaatggaatattggaggactttgagacacgagtgtgtactttctaaaggtaatcagtttgtagcagcgcatgttgaatcattttggttatttttacaaacaactctccctgagttattaattaactgtaggaagaatgtcttatctagagaggctgaggagattttagaaaatttgtttgaatgggataaaaagtgaagaggttttatcggatactttaatgaagaggaggaagctatgacaatgtagcttcccctaaataattgcacaaaatgttgattttgtgcaattattagtattttttattcaaattgtcttctttccaagcgatcaacagcctcacgtttcttctcattattaatatttgtatagatactagtaacttctacagaagtgtggccaagttgatctcggagtaatactaggtctttgttttccttataatgatttgtagcatatgtgtgccgtagtttatgagggctacgcttctcatcaaatgcacttgaatatttatcacataacttctgtatagctctaacagttaactgtgtatatttccccttataatttgttacaaaaagtaagtcttcatcttgagggcagttatatttactaggacgaaccttaatgtactcctgaatatcatctaagcaagagcgagtagctaatacggaagatctcttattacctttacgcgttacttttactttcccctggcggaagtttatgctagatatagtaagactagctacctcagaaactcgaagcccagtgcctaaaatgaggcttataatggctatgtctctttctttatcacgctgaaaaaaattatatttttttggtgatatatctttcaatatttcaccataatcatttgctagaaattgaagaaaagcaacatcatctttttcattaaatatcatgtttgcaacgtcatctgctcttgctgctgcatctactttctccttatgcagttcaattttctccattacattacgagagatgtaattttccccttgttcattctctgtatttagagctaagtacttgaatagggattttaaagcggagaaagttctgttaatagctcttgtctcaataccttctccctgtagatatctttgaaaagttctagcttcatttaatggtagattttctagtgttgaaattggtacatcacatatattagtgaccaccttaccgttttcgacggctaatcgattacttataagccattttagaaacttttcaaattcagtaatgtaagcatacaatgtagcgggggagagggctgttttcatttctgcatactctatgatatactagggcattttacttttatgcttatctattagtattttaaacttttctttttcttggttactcatgttgtacacatcaaatcaaataatgtaaattattttttaaactaatacttaaaccgatatttaaactaactattcggatttttgagctagaatgctattttaataaataacttgattacatatatggataccataatagtttttgaaaaagaagagaggtatcaatatataattgatacctctactatactcaattctatgaaatccatcaaactgttcgttaaatacacttttaacggatacattatatgagataattattgtaaattgaagaattattattacattctgtatgctattgaatagagaactggtgtatggttaaattcactttactgttaattctccaaattggtcatatagtaattttaaacgaatagaatgattttcttttaaaagctcataggcttcacgaagtaatttatgtcttttgttatagagtgtagaacatgtaaatgtgtttgaattacaacaaggacagacaatacccataatggccgtattaaaagcaataagagtattttgatctggatcaatcttacaaaataaacgaacagagttacctgtgtctggctttacaatgattgtgaccatgttatcttctttacgaatattcccattagaatccatctctaaagtggcatgtgttagtttcaattactttcactccttaatttttatgtattagtagaatttttggagtatctaaataaacaaagtttatatttagataagtgcgatttcttaagttcatacaattagtattataacatctatatcccatctgctagtgtacaaggacatgaatctctaaactattttgacaaaaaaatataaacttaatataaaaaaatcaattatctatagtaatctaatcttaattaagtaaaatctttaattcatacaaaaataatgctcagagtcatttaagaactttgagctttaaggagctgactgtggtgaaaaaataatataagagttaataaaaaagagtgcaaaacatgtctgcattcttttttattgcgccctagctacaataggtaaagtatttgtaataaagataggtgtatacatctataacttagatttgggctaatttctccatttttcaagcaaaggaaatatagagtttatttatgtgtatagtgagaattaaggtttagaatattctgtgtcaacattatcaatttactatagtttacaattatgtaaaaatagagatgattataatttttcgaaatagtatattaaaagctatcttaagggtaatgtgagcatttatagcctacttataaagtgggatcaagttcttgtagaattcactaaacaaaatgaggtgactgtaaattgagagaaattgcgaaaaaagtacaaatgatacgtttacaggaggagcatttcggaagtcatgcagacgcagaacagtattgtgccaagcggtgtaaaatagaacgagagagaattaaattagaaaaaaatatagttaaaaaacgaactcaaaaatttcaaacgacagaagaaaaatgggactcaaaatgtaaaaaagcagtacaattatttaatcaaggagaggaatatccaactattgcaaaaaaactgaggtgcaatgtgagtaatttgtatagagagctcaagaaacggggcgtattacaaatgccaaagcaagtagcatcatctaaatcattaaagtcatccataataccaccacaaacaaaaaaatcgaagttcgaacgatataaagagtattatatgtataaatagaagaattaaaggctactcgaaagttgcaaatatttacataatttacctgtaactaatggactttaaataaaaaatttaattaaaaatacaaattaataataattacatctaaaaaattttattcttagatgtatcacgaaatacactttttgaaatcacatttagctctcttctgaattaaacttattctccttttggcagaataaataaaaatacccaaataacaaaaatgtggattaaaaaaaataagagattttttagtgtttgcttctaaatgtccgctaatgtttaatgttacacggttctctgaaatttgttattcactctgtatattttataaccgttattcttaatataatattaaatgaattttttataaatggaaggggatatataatgttaactgaattacaacaaaagtttttcttaaagttaaaaattccaccaaaagaaaatgtgaattttgaagatttgcatacaattcttttacagatggggcacttattaccgtatgaaaacatagacatcatggaaggaaatatacaagaattttctagagaaactattgaagaaaaactacttttaaagaatcgtggaggattatgctatgagattaattctttattatattattttttgtgtgattgtggatttaatgtgtatcgaatagctggaaccctttatgattcgaaaataggaaagtggaacccggatgatggacacgcacttatcgttttacagcacaaaaatgaaaactatataatagatgctggttttgcatcctatcttcctttacatcctgttccttttcatggtgacagtgtgacttctgtaacgggagaatatcgtgttcgtaggcaaaatacagagaaagggacctatgtatttgaaatgaaaaaagggaaaaatggggaaacttctcattttcttgattcggatcttactgatacctggtctatcggctacgctttttatttaaatgcaattgatgaaaagaaaataaatgctatacaaaatatggttatagagcatctagaatcgccagtaaataaggggagtattatttgcaaattaattggaaacggtcatattgcacttactgagaaaagttttaccgaaactcggcacggaaagaagtctaaaaaagaaataacagtgaaacaatattatcaaatacttagagataaattcaatatatttttagacatatagcctgaagttaattgtaaaggttcaccatattatttcgcgaaaattgtatgtttctgcacacgttaatactgaacaaaaaattataggatttcgcttttttcgtgttcaaagctcttttaaacttacctatattcagataattaaatggaattaagttactaagaaaaagggaattttactatatttttaaagagtgaggttcctatacttgggcagattattgcaacggataaatttgccattcttatgatggttcatggcaagcaacaactagtctacaaaaaagcaatttccacaatcattaagtaattctttttcctttttttaaaggagggaaaaacaacaaaaaaaagaaggttgaaatcaaccttctttaaaataaaggaacagatgacagattactactccaactcttaatcaattataataaagttagtgcgaatattcaattcgttataaaatttcttaatatttatggcttattttcaaattataatatgagtaattctttttattaatatatgttcgatctttcctgttgcagaatgaacagctccctgtcaagtagacagtggaaataataaaaaacactttaagcggcttgaaccctgtattctaatgggcttaagccgtttaatttttcttggtaacgttcattattgtaaaactggatataattatctatcgcttgttgtaacgcttcaaatgtctcatacttatgtaggtaatacttttcacacttcaacgtcccccaaaacgattccattggtccattatctatacattttcctacacgtgacatgctatgaatcatttttgccttttctatctttctcttaaacccatgtgacgtatattgataccctcgatcactatgaatcaatggatgttcattctcttttaatatagtgatagcttgatccaatgtttgaaataccaatttattattgtttgaatgttccaatacataactaataatagacccatcataaagatctaaaatggcgcttaaatacgttttccttccgtttcctaatttgaactccgtgacatctgttacccatttttcattgggtttgcttgcagtaaattcacgatttagtcggttttcagcgacatattgcgcagttgagggaacatagcgctttcttttccgacgaatcacggactgtaatccagcaatgtgcattaagcgataaatgcgtttgtgattaaactttttatgatacattctattaatatttaatttcattcttcggtacccataaatgccttctactcgtgcataaatagcttgaatatccagaagaattgcttcattctctaattctctagctgttggcgtacgctgtagccatttataataagcagcacgagatacaccggcaatttcacataaaaggattactgccaaattttcatgcgcatgtaaatcttgaatcgctctatatttattttgtagacgaacgcttgttaacgacgcctcctttcgagttcttctaacttttttaaaaaagcattttctgcacgtaatcgttcattttctcgttctaaacgtttcatttccagtttaaacttttcttcagctgttaattcatattcttctttctttcgaccgcgtttatcttgtagtgcttcttcaccatttgcttcaaacttcttgacccattgatatacttgttgataagaaacttcataactttcggcagtgagctgatagtttttctgatgttgtatacagtaattcacaatttgaattcgttcttctaacgttgtttttcttctacttgtcatagagtttgtcattcctttaccggtatcatttagttctctatgactattatactttttaatccattttctcaaaaccgcagtactggatatattgtatttttggataatcttgtttaacgaatcgtgtcctgatagataatcattgacggctgctaactttagctcttttgagtaacgcttccaagaaagtgcttcttctaggccgtcttcaccattcacttcataccttcttttccaatctctaatcgtcccaggatcaacagaaaactttgccgtaatgtcagctattgaatgatgaccatctttataaagagctaaaatcgccaatttttcagctttagaatatttcattctagccataaaaaatactccccttagataacagatttttattttttatctgtctacctaatagggagcatatcagaatccttattataaggattctttttttgtcttacaaattcacaaatagaaaagataaaattggagagcatgaccttatctttttcataaggagaaaaaagaaaaaattgtttgtagagaataaaatagagattatacaaggatttaaatctaatgacaaagagttttctacttatctagaaattttaacgtatttcccgaaagaagtctccttcctcaagcgtgtgaagggcgtagcccgacgataggtgggagataaatttcggtttggcggagccaaaaggctttgctttttattttccctctgatagaatcagtcttataaagaatgaagattggtatatcaatgaaattagataataataataataatcattcggtgttcttgctatattatcaccttgtattggttgtgaaatatagaagaaatgtgttcaatgatgatatatcagactatgcaaaagatatgtttgtcaggttatcagagaattataacataacattggtagagtggaatcatgatgtagaccatgttcatattttgttcaaggctcatccgaatacagaaatgacaaaatttattaatgcttataaaagtgcaagttctcgactcatcaagagagactttccacgagtgaaaacaaaactttggaaagagatgttttggtcaagaagtttttgcttattaactactagcggttctccaataaacgtagtaaagaaatatattgaaaatcaaggtggaaagtgaggtgaaatgatatgacaaagcacaataaggcatataaattccgtttgtatccaacagaagaacaagcatatcttatgcgtaaaaccttcggttgtgtacgttttgtgtataatagaatgttagctgaacgaaaagaagcgtacgaaaaatacaaagatgataaggaacaactaaagaaacaaaagcctccaactcccgcgaaatataaagcagaatttgagtggttaaaagaagtggattcattagctttggcaaatgctcaaataaacttgcaaactgcctataagaatttctttagtggtcaaaatgacttcccaacattcaaaagtaaaaaagacagaaagtcttatacaacgaatgtagtaaacggaaatattatgttgctaaatcgtcatatcaaattgccaaaattgaaaatggtacgtatcaaacaacatagagagataccacaaaattatagaatcaagtcatgtacgatttctatgactcctacgggtaaatactatgtgtccatcttgactgaatatgaaaaagaaattgtacaaaaagaagtagaaacagttgttggattagactttgcgatggatggattatacgttagttctgaggatgagaaagccaattatcctaatttctatcgtaacatgttagaccgattagcaaaggcacaacgagtattatcaaggcgcaataaaggttctgagcgttggcagaaacaacgtattcgtgtagctaaattacatgagaaagtagctaactaacgtaagaatttccttcatcatgagtctaaaaagttagctattcattttgatgtcgtagctattgaagatctaaacatgaaaggaatgtcgcaagcacttcattttggaaaaagtgtcgctgataatgggtggggtatgttcacttctttcttagcttataaactaaacgaacaaggaaaacaacttttgaaaatagacaaatggtttccttccaccaaaacatgtagcaattgtgggaatatgaaaaatatgactttgtctgaacgaatctattcttgtatatgcggtgtaaatctcgatagagattataacgcagctatcaatatcaaaaatgaagcaatacgactattagcgttaggataaatagcaataaaataacctttggaacaagggagttagctcggctgtctaaggacaaattcgttagctattaaaagtaatgattaaccgagaagcccccacttcaaacagtccgttaggacgttaagtggcgggtagttcacaagaattagatcaaaagtcattttctcataatagagtacataacggatgggcattactttttgatactttgtatgagcattggacgatgtggaaagggcctttttttgatggcgctcatagggagaagtatgtagaatttttaagtgtattagataaaataactgataacttgggcacagctgctgatgcatatgattataaaacattttatatgaggaaattaagatgtgagatgatccaattactattacatttcagccgaaaattaataatagtatagttcccagcatagatgatctaatcaagggaattgatgaaacaatattattatggaatgaattgaaaaatatggttaatgaacgttatgagcatgaacgatccaaacgttccagtttataaaagaagaaagtttttatgaattgctttttttatgtgattgctatcattttatagattttctgattcatattacgtcaaaaaaggtattgaaaatatttattctggatattttcaataccttttttctaatgtaggaaagaagttgggatttttgattttacttactaaaagtttattcttataaaaaagataaatattgataatatggcaatattattattaagtgtaatgaccttgaaaaatttaaatatatcttttaagaaataaaaaaagaacctacctaggttctttttttatagttggtaaatacgtaattaactatagatggtaataaagataatattttggatatctttaatcacttagctggtttctattggtagaatcctttttgctcacgtttcatagatacagaataaattttagcttactaaattggatgagttaacttctgagaatctttaagctgaattgtaaaaactagttagggacataatgaaaaagttggtttaactgagctcacagtatttttagcgatgaaatttcgttgaatatagtataagatatctcatattccattggacctatagcctattttcatgatttatccgtacaattttacgaggcataggcaaagaaatcctttacggcttattaccatctattgttcgactatgataatatcataacaataaagcgtttacaactgaaaaacaaagataatatatgaacattcgacttttttcgacatggattattttatgaaaatgcatcaaaaaatcaagaaaatatgtaatttccattacaaatctattatgttttgcttctaattgtgtaatttaactgtatatttatatgatttaagttatatatcctattcttttgagtgttaagttggaattgagttctttggccatttcttgaactacccccactttcacttcgtttagaagtgagggattcctaatcaattagagttctatcgaactctaattgattaggctaaccccgcagtccttgcggttagaagccttatcgcttcattctttagattgatacttgcgttaatatccctatcatgatgtgtacgacaagaaggacagtcccattcacgtaggtttagatttttaacgtctttattttgatatccacaacaagaacataattggctggaagcaaatgttttcgatacgacaatgacttgtttgccataccattttgctttgtattctaacatggatcgaaattgcgaccgtggaagtaattacagaaacagaagagtcagaagaagctgaagtaattgcggaagtagaagagtcagaagaagtggaagtaattgcggaagcagaagagtcagaagaagctgaagtaattgcagaaataaacgcgcctgtagtagagacatttgtagcacttgaggaaattcagcaagaagatgaagcaattgaacaaaagagtgaattcatacatgttgctgaggctgatgaacaaacgaagaaagatgttcaaagctttgcggatgttttaattgcagaagaacaaccagttgtagaagaagcgccagtcgtagaaaaacaaccagttgccgaggaaacactagtcgcagaagagcaacgagttgtagaagaagcgccagtcgcagaagagcaacaagttgtagaagaagcaccggtcgtagaagagcaatcagttgtagaagaagcgccagtcgtagaagaacaaccagttgccgaggaaacaccagtcgcagaagaacaaccagttgtacaaaaagaagaaccaaaacgtgagaaaaagcgtcatgtaccatttaatgttgttatgttgaaacaagatagaacacgattaatggaaagacatgcagctagagcaaatgcaatgcagccttctgctaatgtacgagtagagaataagccagtgcaacaagaggtagcagaaccacaagtggaagaacgcccagtgcagcaagtagcagcagaaccacaaatggaagagcacccagtgcagcaagtagtagcaaaaccacaagtggaagagcaaacaatgaagcaagtagtagcagagccacaagtggaagaacgcccagtgcagcaagtagtagcagaaccacaagtggaagagcacccagtgcagcaagtagtagcagagccacaagtggaagaacaaccaatacagcaagtagtggtagagcaagtacaaaagccaatttcaagtacggaagtacaagagaaagcatatgttgtaaatcaaagagagaacgatatgcgaaatgtattgcacacaccaccgacatacactgttccgccattagcgctgttgtcgattccacagcaatcagcgttagataatactgaatggttagaggagcagaaagaattattagatacaacgtttaataattttcacgttggagcacatgttattaatgtatcgcaaggtccggcagtcactcgttttgaggtgcagccagacccaggtgtgaaagtaaataaaattacaaatttaagtgatgatattaagttaagcttagctgcgaaagatattcgtattgaagcaccgattccagggaagagtgcgattggaattgaagttccaaataaagaaagtaagccagtatttcttcgtgaaattttaagaagtcctgtattcacaaagagtgaatcaccgcttactgttgcgctggggcttgatatttcaggggatccaattgtaacggatattcgaaaaatgccgcacggacttattgcgggggcgacgggttcaggtaaaagtgtgtgtattaacgcgattttaacgagtattttatataaagcgaaaccacatgaagtgaagttaatgttaatcgatccgaagatggttgagcttgcaccatacaattctgttccacatcttgtagcacctgttattacggatgtaaaagcagcgacagctgcattaaaatgggcagttgaggaaatggaacgccgttatgaattgtttgcgcatgctggtgctcgtgatttaactcgctacaatacgattgtaagtgagcgagaaattccaggagagacattaccttatatcgttattgtcattgacgagttagccgatttaatgatggtagcacctggtgatgttgaggaagcgatttgtcgtattgcgcaaaaagcacgtgcttgtggtattcatttattagtagcaacgcagcgtccatctgtagatgttattacaggtttaattaagtcaaatattccaacgcgtattgcgtttactgtatcatctcaagttgattcgcgtacgattattgatattgggggcgcggagaaattacttggccgtggtgatatgttattcttagggaacggtacatctaagccagttcgtgtacaaggtgtatatgtatcggatgatgagattgaaaaaacagttgatcatgtgaaaaagcaaatgaagccgaattatttatttaagcaagaggatttattagcgaaaacagaacaagctgagtcggaagacgaattgttccttgatgcatgtcaatttgttgtagaacaagggggagcgtccacatcttctgtacagcgaaaattccgcatcggttataatcgcgcggcacgtctcattgaagagatggaatcgcaaggaattatttctgaaggtagaggaacgaaaccgagagatgtccttatttctgaggacgaatttgccgctatgcaggaaacgaatgtatagtaaacggttttgctgtatactaagagaaaatgttggatagtaaagtagggagtaaagcgacatgaaagaaattgaattaaaattaaaaggtgaaataaatagactaacaaataaaacatttaaatttgacgaacgtgttggagaagggtggttctctgccgtttactttttaaagactagagaaatcatcgaagaatttcgcccgaaaagtgttgtaacgatgcaatttttccaaaaggaaaatgcagttctttgcggaacggatgaagtaattgcattgctacaaacattcgctaaaaatcctgaggaacttgagattaattctttaaaagatggcgataaaattagtccatttgaaacagtgttaacaattcatggtccttatgaaaatttcggatttttagaaggtgtcattgatgggattttagctcgtcgtacatcggttgcgacaaacgtatataacgttgtccaagctgcgcgtagcgtagataaagaaaaaccagttattttcatgggagatcgtgacgatcattatacacaacaagctggtgacggttatgcagcatacatcggaggtatgagcgcacaagcgacgcatgcgatgaatgaatggtggggcaaaagtggtatggggacgatgcctcacgcattaattcaaatgtttaatggtgatgttgtggaagcggcaaaagcatatcataagaaattcccagaagatgaattagttgtattaattgattacaacaatgatgtcattacagatgcacttcgcgtagcgcgtgaatttggatcaacattaaaaggtgtacgtgtagatacgtcccgcacgatgattgatcaatacttcattcgccacccagaagtacttggaacattcgatccacgtggtgtaaacccatcgcttgtattcgcacttcgtaaagcacttgatgaagaaggattccagcatgtagacatcgttgtaactggtggatttgatgagaagcgtattcgtgaatttgaagctcaaaacgtacctgttgacatatacggggtaggaagtagcttattaaaaatgaatattggctttactggtgataatgtagaattaaatgggaaaccagaagcaaaagctggtcgtaaatatcgtccaaacccacgtttagagcgtgttcaattagaaaaaagagaagagatgtaaaagagagaaaaactgataggtgattgaccctatcagtttttctgttatcatagtatagcggcttcttttttgctataatggacttgttatggacatataaagaagtacgtacgagtttatcctgataagtgaagggaaaaaataacttcactacatcaaaaatgtatgatgattaccaaaataagaaaagattcatatactgtcttatagataggccgttgtattagttcgaaatgttggaggttctttaagatgacagtttaccattttgtaggaattaaaggaacaggaatgagttcattagcgcaaattcttcatgatatgaagcatactgttcaagggtctgattatgaaaagcgtttctttacacaaacagcgttggaaaagcgtagtatctcgatccttccttttgataagaataatgtagaagaaggacaagtgattattgcaggaaatgcatttcctgatacgcatgaagaaatcgtagcagcaaaagaattaaacatcccagtccatcgttaccatcatttcttaggtgacctgatgagccaatacacaagtgttgctgtaactggtgcacacggaaaaacatcaacaacaggtttgttagcccatgtaatgcaaggtgcacacccgacatcttaccttattggagatggaacagggcatggggtagaaaatagtaagtattttgtatttgaagcttgtgagtatcgtcgtcatttcttgtcttataatccagactatgcaattatgacgaatattgattttgatcatccagattattttgcagacatcaatgatgtattcagtgcattccaagagatggcattgcaagtgaaaaaaggcattattgcatgtggagatgatgaagaacttcaaaaaattcaagcgaaagtacctgttattttctatggatttggagaagataatgatttccaagcacgcaacatccaaaagagaacagatggcacgatattcgatgtattcgttcgtaacacgtactatgatacgttcaaaattacaggatacggcaatcacagcgtattaaatgcgttagcagtaatcgcgctttgccattatgaaaatgttgatgtagaagcagtaaaacatcaattaacaacttttgaaggcgtaaaacgtcgctttaatgaaaagccgatgggagagcaagtaatcatcgatgactacgcacaccatccgacagagattaatgcaacgattgaagctgctcgtcaaaaacatccagagcgtgaaattgtcgctgtattccagccacacacattctcacgtacagaaaagttcttagatgagttcgcagaaagcctaagcaaagctgatcaagtatacttatgtgatattttcggatcagcgcgcgaaaataaaggtgaattaacaatcgaagatctgcaaaagcgtattgacggtgcagagctaattacagatacaacaacggatgtattaaagaaacataaaaacggcgttctaattttcatgggcgcaggtgacatccaaaaattcgaagcagcttacgtaaaagaagttcaagttgcagagaagtaatagaaaagacgcatagcttagctgtgcgtcttttttatgttgtcgtggttatgcattaatgttgaaacgtctatatatatggagttgtgttcgatatatttcaaaaatcgttgatatattggtacgcgttttgaaatataagtgttagaataataagaaaactaaaaaggggactaaaaaacatgttcacactccgagtagatgacgaaatcgaactacaattactagaaaaacatcataaagaggaattatatcaattattagatcaaaaccgtaatcatttacgaaaatggctcccttgggtagatgggacgaaatctgctgatgcttatgatgagatttttccgatgtggttaaagaaatttgcagagggagatggttttgaaagtggcatacgttacaaaggaaagctcgttgggatggtaggtattcatccagtgagctgggggaagaaagcgacgagtcttgggtattatcttgcagaagatgctggcgggaaaggtattatgacgcgtagtgtgaaggctgtacttcactatgcatttgagaatttaaaattaaataaaatggaaattagatgcggtgttgaaaatgtgaaaagccgcgctattccagaacgtttaggatttaagttagatggcattttaagagatgatgaatggctatatgatcattttcacgatatcgctgtatatagtttactagcttcagagtggaaggagattcgatgaacgagaagatacgcattattccgtatgaaagtacgtttcaagaggaagtagtagatcttatcgttcatattcagcaaaaagagtataatgtttcaattacgaaagaagagcaacctgatttacttgaaatagaaacattctatcaaaaggattacggaaacttttggatagcaatttatgatggtaaagtagttggaacagtagctttattagatattgagaatcatcaagtagcgttaagaaaaatgttcgtgaagaaagagtttcgcggaaaagaatggggcgcatcacatatgttgcttcaaacagcaatttcatgggctgaggataaaaaattgaaagatatttacttaggaacaacagtaaaatttttagcggcacatcgtttttatgaaaagaatggttttgaaagtgtgagtatagacgagttgccgaaaaactttccggtgctacaggtagataagaaattttataggtacattgtgaaaaaggtcatttagaaatggcctttttctatgaagcaaaatggaaatagtggtataatttgggttagggggtgtaggtatgaactttccaattcaaagaagtaagtcagtagtcattttcgtttgtcttacgttagcgtttatgtttatatatccaattgtcatgcttttcaccaataaagcgcattggatgtcagcgttgattgggatgggtttatgcttcattgtaaatgtaccactcgtttgggaagtatttattaaaaaacataaagtagaaaatggcgtattaaagtacggtattttaaatgatgatattgtattaaaagatgtgagaattatacgtcaggtcggaaagtctcttgaaattacgacgaatgcatataaagtacatatggttgcgatgccgcaaaatatggatgaattcttggggcttatagagaaagaaaatccacatgtgaaaatagaaatggtaggaaagaaataaaaacgctcggcgaaaattccgagcgtttttattattattttaagttctctgggtttaaagcttctagttcaggtacaacgaagcgtccgtctttacggattagtacgtcgtcgaagtaaatttcgccgccgccgtattcagggcgttggatgcatactaaatcccagtggatgttcgagttgttgccgttccatgcatcgtcgtaagcttgtccaggagtgaagtggaagctgccatcgattttttcatcgaataggatgtctcccattggatgtaagatgtatgggtttacgccaattgcgaactcaccaacgtagcgtgcgccttcgtctgtatcgaagattttgttaatgcgctctgtatcgtttgcagttgcttcaacgatttgaccgttctcaaacttaagttgtacattttcaaatgtataaccgttgtaaggagatggtgtgttgtaagaaactgtaccgttaacagaatcacgaactggtgcagagtatacttcaccgtctggaatgtttaaatgacctgagcatttaattgctggaatgtctttaatagagaatgttaagtcagttccaggaccagttaaacgaactttatctgttttattcattaatgtaacaaggctatccattgccttatccattttaccgtagtctaagttacatacttcgaagtagaagtcttcgaaagcttctgtactcattttagcaagctgtgccatagaagcatttgggtagcgaagaacaacccagcgtgtttttggaacgcgaatgtctctatgaacttttttaccaactgtttggccatgaactttcatacgctcacttggaacgtcagcttgttcattaatattatcaccagagcgaaggccgatataagcgtccatgtctttcattacgcttgcttcatatgcagcgatttgttcgaaatgttcttcagtagcacccattaataaagagcgatctacttgatgatcttttaaagagacgaatgggaaaccaccagctgcatatgcttcttttacaagtgcagttacaagttctttttgtaagccaaagttttcaattaatactttttcacctttttgtaagcggatagagtagttaattaaattgtatgctaacttttcaatacgtggatctttcatatgtaaagcctccctactaattatgtatcctctcctattgtaacctacttagtggaatttgttgaatgatttatgttacagttaacgaataagtatgaaaattctaatgatgagatagggattagaatgaaacggaaaatgattgtataataggggaaagtatgaaaaagataaaggaagtgatgaaatgcaagttcttttatatgtaagtgcggctattatcgcggttgctttcgcagtattagtagtgtatgtatgcagaacgttgttatcggttcagaagacgttggaaaacgttgcaagcacgttagaaggtttagaaaagcaaatgcaaggaattagcgtagagacagagcaattattacataaaacgaatgcgttagctgatgatattcaacagaagtcacagtcattaaataaagtggtagcgggtgtagatgggattggaacgacaatccaatctttaaatacgaagcttcgtaatgtatcggactctgtaacggacgaaattgaaaataacgctgataaagtagcgcaagttgtacagtggagcagtgcggcgattgaagtatacaatcattaccgtgcgtcgagacaagagaagaaggttgaaaaagaagagcgtaaattagaaagaattgagaaaaaagctgaaaagaaagagaagcgctctagatttcgtatgagaggtgaatcgtgatgaatatgacaaaacttgaaacaattgaagagcttgaagtcttagtagaaaagaacgagccgtatgttctttttaaacatagtacgacatgcccgattagtcacggtgcatacacagaatttcaagcgtattgcagcgaagaaagagaagtgccagcgtattacttatacgtacaagatgcgagagatgtgtcaaatcgtgttgcagaacaatacagtattagacatgaatcaccgcaagtgctatacataaaagatgggatggtagtatggaatacatctcattggaatattaaaaaagatgctttagaagagaatataaagtaaaaagaagcaagctaaaggtgcttgcttcttttttttgtttttgttgaaatatatttagtggtacactattaatagttcaaactaaataactagattgttgaaagtaggttttaagtaatgaagaaaatggcattatccttcgcagtcgtaagtttattactgggagcttgtagtaacaatagtaatacgattagtaagaaggatgaagttatacaaaaagatacaaaagaaaaaagtatgattccgagaactgctgtttctaaagattattatagaactgttattcctttaaaagaacaaaaggttattaatacagctaatataaaaacaaattctaaattagatttagcagagtatgaaaatggtttaataaatattgcaacgcagcaatttgatacagagagtcacgtactgcaattaaaccagtatattccagagaaactaattgatgaactagttgcgaaagtagaagcgccagttttgacgaatattatagaacaagactatttcggaaaacagaattcaaatgaactaagtttatctggtgttatgattggcttagctatgtcttcaagtgtatcgaatgaagaagctatgtctaaagggtctgaagttgctaaacaacttattgaagctattaacaaaaatgataagtataacaaatctccaattacgtttgctatctttaagcaagaaagtactagttctttaaaaaatggtacgtatattgctagtgctactgttcaaaagaatgatacgaaccttggaaattggagtacaattgatgaaaagtcgtattcatatccttctgatgaatttacacaagcacatggagaagataatacaaaaataaataactttgctaaggaaataaaaggtttttctaatggagattttattccagtcaacgctaaagtttcttataagaaagatcaaatggatacattaaatatgaatattgttattaaatataacggtaaaacagaattaatggctcttacccaattggctgcgcaaggtatgttagacaaattgcctaaagatgcgaaagtacaattacagatcaagtccgaaagtaaaatcgaggctgtgattataaaagagaaaaacagtgataaaccgtttgtttccttcttgtaaaaaagacagtatgtaaactgtctttttttattttaaatgaaaatatacaacgttttttgatggtaattcattgctgtatatcgtgtgacaatcgtatatgtatcagctataataagttatcttaaaaaagtaacatataggaatttgaaagaggtggctttcttatggcatcacaacaattaggtcgtttacgttctgaaattgatcaacttaatttacaaatattagagttactaaacgaaagaggtcgtctcgtacaagaagttggtaatttaaaagaagtacaaggtgtgaaacgttttgatcctgtacgtgaaagaaatatgctggatttaattgcagagaataataatggtccatttgaaacttcgactttacaacatattttcaaacaaatttttcaagctggtttagaattacaagaagatgatcatcgtaaagcattacttgtttctcgtaagaaaaaaacagaagatacgattgttgaaattaaaggtgaaaaaattggtgacggaaatcagcattttattatgggaccgtgtgcagtggaaagttatgaacaagtacgtcaagttgctgaagcaatgaaagagcaaggtctgaaattaatgcgtggtggtgcgttcaaaccacgtacttcaccgtatgattttcaaggtcttgggttagagggattacaaattttgcgccaggtagcagatgaatatgatttggctgttattagtgaaattttaaatccgaatgatattgagatgtcattagattacgttgatgttattcaaattggtgctcgcaatatgcaaaactttgatttgctaagggcagctggtgctgtaaataaaccagtattattaaaacgtggtctatcagcaacgattgaagaattcattaatgcggcagaatatattatggcaaagggaaatgggaacattattttatgtgaacgaggtattcgcacgtatgaaagagcgacgcgtaatacgcttgatatttccgctgtgccgattttaaagaaagaaacacatttacctgtcgttgtcgatgtaacgcattctacagggcgacgtgaccttctcttaccaactgcaaaagcagcgatggcaattggtgcagatgcaattatggctgaagtacatccagatccagctgtagctttatcagatgcggcgcagcaaatgaatataccgcagttcaatgattttatgaatgaattaaaatcatttggaagtaaattataaaaacttttaatgagctgttccaaaaagggattttggaacagctttctcttattgtatagcgactgtcattgtcgatttttgttggtaagttgatatatttaaaaaatcgctgatataattagagttgcggtcgatatatttggaaaatcgctgatatatttcgagttacagtcgatatattcgaaaaatcgccgatataaatttcatttactatcgtactgcttaaaataagatttctacttaggaaacatctatttttttacaaaaaatgcccttttttcataaaaaatacgaaaatacgagaaaagaagcgaattttttcgaaacttttgcgggaaaatattgtatgagcctgcgtttttatcgtatcattagtaaaaggaagaactcgggacgattggtggcatctgcaaatagagttgatgtctttttttcattcaagtaaccgatacataaaaatagataacaaaaatagaaggagtgtgcgatgagatgaacgtaacaatctatgatgtagcgcgcgaagcaaacgtttcaatggctaccgtatctcgtgttgtgaacggtaacccaaatgtaaagcctacaacaagaaagaaagtattagaagcaattgatcgtttaggataccgcccgaatgcggtagcacgtggactagcaagtaagaagacaactacagtaggtgttattattcctgatatctcaaatacgttttatgcagaacttgcacgtggaattgaagatatcgcaacaatgtacaaatataacatcattttaagtaactctgatcaaaacaaagagaaagagttccatttattaaatacgatgcttggaaaacaagtggacggaattgttttcatgggtgaagatattacagacattcacattgaagaatttaaaaaatctccagtaccaattgtattagcagcgtcatttgatgagcaaaatgaaacgccatcagtaaatattgattatacacaagcagcttatgatgcaatgaagcactttatcgagcaaggacataaacgtatcggtttcgtctctggtcctttcattgataaagcgggaagtgcgaagaagttacaaggttataaaaaagctttagaagaagctggtatttcatatgatgaaaatcttgtaatcgatggagattacacatatgactcaggtatcgaagcattcgaaaagctttggagcaatgatgaaaagccaacagcaatcttcgtatcttctgatgaaatggcactaggtgtaatccatgcagcacaagacgctggattaaacgtaccaactgacgtagaagtacttggtttcgataacacacgtcttgcattaatggttcgtccgcagctttcaacagttgttcaaccgatgtatgatatcggtgcagtagcaatgcgtctattaacaaagtatatgaacaaagaaaaagtggaagatcacactgttatcttacctcaccgtatccaatttagagattcaacgaagtaagtataaaaaagctcacagcgattgctgtgagcttttattcgtattcaggatagtatttttgtacgactgcatttaccatttcgtctttcttaacgtgtaaaaatcttgcgtacagttcttttccggtttcaaatggtgtatcgtctaattcaaacacatgcaacacttttcggaacttccacgttatttgctcaccgtacatattatcgtacgtatcttcagattgcatagcaatttttttaccaagttcgtgagcatcttctaaattgtttgctttaacaagaataatactttcttcaaaaagtgtatcgtgattctcttcataatgctcatcaattttcgtaggatcaggctcactacaatgaacagattcaaacaataattttacagcgtacatattatgctgcatgtttcactttataaataatacttgcgacaagcgaagcaggtattgtaaatacgttactttgataatggtaatgtacttgggattcttcataagacatgttatcatatagttcgttttgtgagacactcaattttttctgtttttctttgagcattttaatgtagttgtactgtattgggacgagaatgatgaaataagctaatacgattagtgaaatccaaatcattatgaacactcccttacaaagaatatttctctataacaattatatcaataaaaagaaaaaataaccatttttagtggggctaattttcttctaaaaatgcgaacagttccttttggttttttaaattgcgatcaatacatgttcgagcaacatatttcaatccttgtaataatgcatctacgtgcaaagtatcataatgaattatatttccctctaccatcgtttcgtctttttgcaagttaattgatatttttagtacagttatattactttgtaaatttacaacttctatgtaaaaaaactgtttgtctaagtcaatcgtaacataatcgaatcgttcggatagctctaatttacatgtagtagtatagtccaaatgaaagcctccttattgtataagtgtatgttataatgccttcgctatagatggggctattccttgttatatgtcacataagtgcaaatttaactattatagggcaatgtcatgtataatagaaagaaaaggcttgtgaggggggaaaagagatgatcgttctttggataattacgctttgtatgactgctatttttgcatatatgacgttaaaacaaaatggtttaaagcgatttgttccaggaagtattcttgcaggaattgcccttatcacgtatgtaatttctatttttattgaaagtgtatcagtagatatgagcacaagtttaatgtttattggtattacactatttgcaggtagcattatggtacttatggttgctggtattattttatttattcatatgaattcggaaacgttatagcatatagaaaaggcatgtcccgagggacatgcctttttatccgttcaattatgctctatctttagaagagttttgctgttttagtaagtcgcgaatttcgccaagaagaacttcttcttttgttggttctggaatttcttcctctttttcttcttcttcttttttagatgttagtttgttgaaaactttaacaaacataaagatagaagctgcgataattaagaagtcaaaaattgtttggatgaagttaccatacataacagcagatttaccgtatccaaagtgtaaatctgtaaagtcaacgccacctaataccataccaagtaatggtgtgatgatatcttttactaaagaactaacgattttaccgaatgcagcaccgattacaaccccgacagctaaatcaacgacattccctttgaaagcgaattttttaaactcgttccacatgtgttaatcccatcctttccacgattcattatgaaatttataattcctatcaacatattctatagaaatttacgagagaaataaagagggaatgggaatgaaagtaaattctgaaaaatgtatctgttttaatttttgtttacatcatctagtaaagattgtagcatttgctgtgtttttaatccttctaatccatctacaacgggctttgtatcgccttgtacacactcaataaaatgatgaacagcatcttcaaaaccacgttgttttaacgtcgtatcccatgatggggaaccactttgtgaaactgagttttcctgttcaatttcaaatgtattcatattttttacgcgaatgattttccctggcgttacaagttcaatttgttctaaattagtaccggcatggcgatgcattgcagtagaaagtaacagtccacttggagttgtatatgtatgatgtccgtaaagaagttcattcttttcattgatttgcatcatattgtgaacggcgttaaggtcatcattagctaaccagcgagcggtatctacaatgtgtaaataatcatctaacatagtgaagtcgtacgtatatggcccgactttatttgtacgatgcttttcaattcgaatccatgaaatatcattagcctgttctttggcagcgacatacataggaacgaatctgcgattaaatccgaccattaattttcggttatacttctcgctcaactcgactagttgctcagcttgttccactgtagctgctagcggtttatcaacataaacgtcgatccctttttttagaagttcagaaacgatttcataatgcgatgcagttgaactatgaacgaagattgcatcgcattccgaagctaacatttcaatagaatgaaagtcttgaattcggtattgctggcaaacttgttttcttttctctgcattaggtgtaaacgcccctacaaaattccaatcagtttcttttgtaagtgttggaagataggccttttgcgcaatacttccaagtccaatcattccgattttaggtatattcattttatctccgccttattattcaatatttatatgccggaataaatgtagcataggatagctgagaatggcaaaaatgaagaatctatattgagagattctttatatcatagtaagttcgctgtcgcttaataatttgtgtagcattttttcttgattttgtttagctgttttattccctgttttagcgtataaggaaattaaatggtgatacgtattttcttcaaatggattcatagattgcatacgcatgcaaatatcaattgcttcagtgtaactcgcgccttctatataaaaacgaataagggaaaaggcgtgttgaaaatataagttttgtaatcttgttctttctccttcgctccaccaatagtccatatcaataaggtaatctccagtatataaagagaggcatgcaatgtatttatctaatgtatcgctacatatttcttttggaagagcggctgctgcttgttcgaatagatcaacatcaatcaaaatgttttgtaaatcgagtttatatccgtcattcactcgagtaatgtttacattcatttcgtaagcatggatggttcttcgaatttgatatatggctgaatgtagatttactcttgcttgttctaaatcagtatttgaccagagtaattcaattaaagtatctctattaataactttatttcgattatgaactaaaaataaaaatagttctttcgctttttttgtgcgccatttttctagggggatttttttgtctttttcatgatctacataatataactcaccaaggcaattgagtatcgaagtttctattgtagaggaattagttgtttcaatcgtcatgctttgcataagacgttgaatagtgttatgcaatctttccctcgtaataggtttcataatgtaatccaatgcataaatttcaaatgcttcaaccgcataacggtcgtgtcctgtaatgaaaactatttttatatttttatgttttgattgtagttcgcgggctaacataacgccatttttttcaggtatctcaatatcaagaaatgcgacatcaattgtatgatctttactataaaaactaagagattcacaatcatcaaagcaaacgatatctttaaaaatttgaagttcttttaacatcttttcaagtctttggagtattaatggttcatcatcaacaataattgccctcatagttcattacctctttcttacaatcttgtttaatgatttaactcaagtcatatcaccaataaatatttagacaaaataggacatttttcattcctccataaataaccataaatattacatggtaattatttgtaattactattataaatgattcttattaattgttatatacgataaattatttaaatatttctattttttgattttttgttcagtttttgttcagtgtcccaatttatactttgagcgtaaaagtaatttagcgaaaaagggggaaatgaggcgagataaatttatgttaagtgagaggatggaacgatgaagaagaacgtcacattatttatgttgcttctactcgtatttcaagtgattagcccagggataatagcggttgctgctaatacggtggaagcggtgcagcataaggtaacaactaaatcgacagggaatatgtgtttaagggagcatgaaggggagctaatttttaagtggccagcaccaaaacaaaagaaagttgattttgttattgtgcaagatgcaagtggaagtttcaaaggcacaatgccaaatgtgaaaaaagcattgagcaatatcgtagatgaactaaatcctgcgacggatcggattatggtaacgagttatcaagattataagggatataaagctagtgacggtcgtgtacttgaaagtagaggtaatgggattaaaacaaccttgcaagcaggattaactaataactttacctcagcaaagaatggcatcaataaaataactccagatagcggtacaccaactgccagtggtcttcagtttgcgttagctgagtatgagaaagcgaagggacaaaatgatccagaccgagaaacagtttttctgcttgttacagatggtgttgctaacattcgaaaggatggctatatttacaaattaacaaatcaactaacggatcagggcacaggttataggtcgaatgaatatgggcaagattatgtaggtgctttgaaggaagtaactacagaggctcaaaatataaaaaacgcgggatataaacttgttacagctttttgggaagataaaagtatactagcagcatctgaccaatattatactaagtacgataaagaagtaggtccatatgcaaggcaagagttaaaaaagatggcaacaaaaccggaatggtttgtactggcaaatgatattgaagagtttacaaaaaatttaattgaaaccgttacaaaagtgacaaaaaaagaaaaagataagttgattttaaatattaataatgatttgctcgtaacaggtgtgcaagggtctggtccaaatggtgttaatacaaagcctgttatacaagggaatcagatcatttgggatttagacggacagccagaaggaacgtataaagtcacttataaggtgaaggaaaaaacaccgcaatcgaaagaatttaatgttgcggatggatattttatgttctttgatcaaaagtttgatattcaagccgtcaaggcacttccgaatgaaaatgctactaagtgtaatacggcggtaacgaaaaaagtttctgattcagatcaaaaactggtcgatgaggcattgttaaattcattgcatgaagaatttgtatatgatgtcaattacaactttggatttgatatggagtcaaaacaagaaatcgttatacaagatgatttggaagatattttagaagttttagagacgaaattagtaaatgaaaaaggcgaagttgtaaatatagcgccagttatagataaagaaaagtcaattgtaacgtataagttgccaaagcaaaatgattcgtacgcgtatttagctggtggacaatatcgattaacgattaaagcgaagataaagattggtacaaatatcgatgtgatcaaagggtacctagataaaggtggcgttccgaatacggcaaagctcattatagataacaatccagttgtttctaataaagtcattgtgaagccaccaattgaagaaccgaaattacgcaagactgtatcggatgatgatgaaaagaacgtggaaaaggctacattatccaatgtaaaagagaagtttgtttggaatgtgcagtatgaatttggaagttcaccaagtggatacgattctatcgtattacaagatgatttagaagatgttttagacatattagatgtgaaggtcatcaataaaaaaggtgaagtcgtaaatataaaacccaaaattgatactgctaagaaacaggtaatgattgaagtaccgaagcaagaaggaagttatgtgtatttaacaggtgaagtatatacggtgcaaattacatctaaaattgctgatggtgtaaatcaatcagaattagcacgttatatagtaaaaggtggaatcccaaatacagcagagttagtactaaataataagtcagtgaaatctaacgaagtgtatgtggttcctccgaaggaaaaaccgaaagtaacaaaaaccgtttctactcaaaatgagaaagaagtggaaaagggtacattgcaagagagaaatgaagagtttacttggaatgtagcatatcaatttggtaatgatacagcaaatttagagaaggttaccttacaagatgacttagaggatattctagatattttagatgtgaagcttatgaatgaaaaaggtgaagttgtaaaagtaacaccgaacattgataagcaaacaaagaaagtgacaattgagttagagaagaaagatggttcatatgcgtatttagctggtttaaagtacacgatgcatattaaaagcaaaatagcagaaggtacaccagtagaggtgttagcgaaatatattgcaaatggcggcgtgccaaatatagcagagctcatatttgataatacgccaattagttcgaataaagtagttgttattccgccatctataggtaagatcgaaattgaaaaggtagatgcagctgatgaaaatattaagttgcaacatgcggaatttcaagtttttaaccaagaaggaaaagaagttggaaagttaattacagatgaaaatggcaaggctagcttagagaaactaccgtttggaaaatatacgattaaagaagtgaaagcgccgaatggatatatgttgctccgtgatccaattgaggtcgaggtaacggcagcgacacctacacaaacgttaaaagtagaaaacaaaaaaagcgagtgggaaattccaaacacaggcggtgctggaacaaatgtattttatttaattggtacttttttaatgattgtagttgtatttttgtttttccataagagaaatagtaattactagaatattaaattggtagaagaggagaacgagaaatgaaaaaatttttaagtatgtttttaatctttttgctagcatttgcttcattgccaagtatgttaataaaagcggaatcgaaaagtgaaaaaaaaggcacgttaacaatccataaatttgaacaagagccgcttaataatccagctttaaaagaaagtagctctaaaggagtagaaattcctaaagatgcgaagcctttagcaggagttgtgtatcaaattaaacaagttgaatcatttggaacaatttcaaacgatgggaaaattgttaaagaagacatcaaaccagtaaatggagttccaattgaagttgaaacgaatgcggatgggattgcattttttggcgatttaccactaggtcgttacgaagtgaaagaaatttctggaccaccacatgtaaatatagacacaaaaacatacaaagttgatatcccgatgacaagtgaagatgggaaagtattaacatatgatgttaaaatttatccgaaaaatgaaacgaaacgtggtgcagtagaattaacaaaaattggtgtggaaaataaagcgttaaagggtgttcaattctctttatataaagaagatggaacagagttagaaaaaggtttggagacagatggaaatggtaaaattcgtgtcggtaacttatcgtacgggaagtattactttttagaaacgaaagcgctagatggttatgtgttggatccgaaaaaatatgaattcttcattaaagaatctggtgtaattaataaagatggtacagttacttctggtgaagtagttaaagttgatgtgaaaaactatgaagaaccaacaattgataagaagattaatggagatttaaacaatttaccaattaatacgaagacggattataactatgatattaaaacactaattccagaagatattaaggattataaatattatgtcgtaacagatgtattagatagtcgattagaaattcaagatcaaccagttgtaaaaattgatggtaaagtagtagatgcaagtgttgtagaagtagttgtagacggtcaaaaagtaacggctactgtaaaagatttctctaaattagataacaaaaaagagtttcatttgcaaattaaagcacaaattagagatggcgtagaaacaggagtagagattccgaatacggcaacaattacatttaaaaacaaagatgatgtaacaggtgagaaggcaacaaaaccagttatcgttactccaacgactggtggtattacattaacgaaagttgatgggaaggatggtaagaaattagaaggtgcagaatttgcgctgcaagatacaaaaggaaatccagtagaaatcgatggaaagaaagtagtaggtacatctgataaaaatggtgtaattacatggaataagctaccttacggtgagtatcaagttgtggaaacgaaagctccaacttatgaaaaagaagatggtacaacaggtagttatcaacaattaagagagccaattcatgtaaagattgatgctgatcataaaacagttacacttactgtagaaaataataagagtggatggattttaccttcaacaggtggtatcggtacaatcttatttactgtagtaggtcttgtattaatgataatagcagcatttgttttctttagaaaaaaagcaacaaataattaataagcgatttaaacggtaatgaaaagaggagagggaggcctttcctctttttcggcattttagcccgttatttgagggctaacaatcagtggggtgaacaaaacctacactgattaaagtttcactttataggaggatatgatgaaacgtaacattatatttggtgctatttttttattgggactttgtattttcttatatccaacagttagtaattggttagcaacacgagctcattattcagcggttagttcgtatgataaaaaagtaaaagagttacagcaaaaagaaattgaacgtaggaagaaagaagcgaatgaatataataaaaatgtccagacgacgtcacagtcattttcggatccatttaatgaaaaagggggcgacgagagtggacgttcatatgcagatgtattaaatgtaggtgagagtatggggtatattgaaattcctacaattgatgtaaagcttccaatttatgctggcacatctgaaaatgttttgagccgaggagtaggacatattaatgcttcttctttgccagtagggggagaaagtacgcatgctgttttaacggggcatcgtggtttgccttctgctttattatttacggacttggataaggtgaagaagggagatactttttacatacattcattaaataaagtgcttgcttataaggtggatcaaataaaagttgtattaccaaatgaaacaaatgatttattagttgtgaaaaataaagattacgttacgttagttacatgcacaccttatggagtaaatacacatagattgatagttcgaggggaacgggttccttttgaagtggaagaaaaggaagcagttgtggctcaagtgaatccatttgtagtagaaaagtggatgattggaatagtaatcgttctattatttttcattggaatgtttctttattttaaagtgaaaaaacgttaaagtacgagtgatggaaatatttttagaatatagttattattcactcgataaagaaagtgtgatatgttatggtaaagatttgaaaagattccgtaattttataaagagggaataagtatgtctaaaagaaaaatattgatagtagtattcttatttatcctttgtattgtcggttttcgttccatttggtttaaacaatctctttatataaatcaaccacatgctgaagaagggatagtaaatttatcagatataacatttggcgaaaaaaatttagttacgttaaatggtgaatggaaattttatccgaatgttttacttaccccggatcaaatgaaggaaaataataaagattatgaatatattaatgttccggggaactggaaagaaagagttgatcgtactcatcaaaaagaatatggcacatatgcgctatctatcaaagtgaagaattcgaatgaaaattacggcttaaaaatacagcgtgttcataatcagttcgatttgtatgtaaatggagaacttgtacaggaaagaggaagtatttttaaaccgaatgatgtacataaaacttcacttacaccaactgtcataaaggtaaaagcgaatgaacaaggggtaattaatcttcttattcctgttacgaaaacgacacaagaatcgaaacatggcgggattacaggtggagtgcgttttggcagtgaaaatgctattgtacaggatagctttaacaatcttatgatgcaaattattgcaacgacaatagtgtttttacatggtatatatgcatttatcatttttgtgatgaagccgaaaaatgttgagattctatatttttcacttggtagtatatttgcaggtattatatttttaattacggatgaacgttttttgttctctttgtatgaatttgaattttcaacatatatgaaaattatatatacatcgtttgtaggtttcgctttatttattttactgtatatgaaaaggtttttacgaggttatggggacaataaatttattttatttaccatcgtattatgtggaatttatgttttcgtagtattgttttcttcacctagactagtgcaagattttggatttatattattttttacaattattattccattcattttaacagcaattattgttttacgagtggtggaaagtggaaagtatgatttaatctttttactttttacagtgattagtgctacttctggagtattgtgtgcgagttttaaagagtttgcgttcatgtatagcatagggtttgcgaggatatttgatgcggatttttatccatttgatatttttttagcaatggtatcattttcgactttttggtttatccgattctttcgcacgagtgatgagaatagtgaactggttggaaaattaaaagaagagcatcataagaaagatcaatttttagcaaatacagcgcacgaacttagaaatccgttacatgggatgatgaatattgcacaaagtgtaatggatgaagagaaagcgataaatggtgaaagtaaacaacatctaaaactattaatgacaataggaaggcgtatgtcgtatttgttgaacgatttaatagatgttacaagaatggagcagaaagggataccgattcataagagaccggttgatttgcaaccaattattacaatggtgattgatatgcaaaagtttattggagaagaaaagaaattacaaattatcgcgaatatccctgaacggtttccatttgtattagctgaccaaaatcgtcttattcaaattttatttaacctacttcataatgcagttaaatttacggatgaaggggctattacaattgatgttgaaaaacgaaaaaattacgcggctattcaggttacagatactggtattggaattgataaagaagcgcaaaagcgaatcttccttccatatgaacaaggtagtgattcatatggtgaaagtggaggatttggacttgggctaagtatttgtaaacaattagtggaaatgcacgggggaacacttactgttacatccgttttacacaaaggctctacttttacattcacattaccacttgctgaaagagaagagatgctaattgtgtcaaaagaaacaattgaaaaagtagtggaattaaaacaagttgaaatgaaggataatcgagtcggtaatagaaggagaattcttgctgttgatgatgatcctataaatttaaaagtattaaagagtatattaccacaagatgaatatgaacttgaaacggtaacaaccggaagagaggttttggagcggttaaatatggagtgggatatgatattagtagatgtgatgatgccgaaaatgtcaggttatgaattaacaaaaatgattcgtacccaatactctattgcagagttgcctattgtactgttaaccgctaggtcgcagccagaagatatttatacaggatttcttgctggggcgaatgattacattgtaaagcctatagatgcactggaattaaaagtgagaattaatgcattaacagagttaaagcaatcaattcatgagcgaataagaatggaaggtgcttggcttcaggcgcaaattcagccgcattttctgtttaatacactaaatacgattgctgcattaggtgaaattgatattgttaggatggagaaattaattgttgagtttggaacgtatttaagagccagttttggtgaagaagtgttagcggaaaccgtacctatacagcatgaattagatttacttcaatcatacctttatattgaaagagagcgatttggaaagagaatacagagcgtgctggaagtcgaagatggaatagaatgtgtagtaccaccgttttctattcaaacattagtagagaatgctgtgcgtcatggtatattaaaaaaagcaaagggtggaagcattcatataaaaatagagagtgtgagtggatttataaacatttcgattgcggatgatgggataggcatgtcagatgaaaaaataaaagaaatattagtgaaaaaaccgaatcaaaaacagggaataggtttattgaatacggatgcacgattaaaacagttatacggaactggattagaaataaaaagtgaacttggaaaaggaacgattgtttcattccagcttcctgttgttatggataaataaggttgttaaaaaatccgaagtgatgagcgcttcggattttttagtacattttttacttattcccctctaacaaaatcttctctatctcctcaaagtgatgagtgcgagcatgctctagcggggtaacaccatcattgtctggaatatttacatctgcaccgtgctcaataagaaggcgaatgacttgttgctgtgtttcgtttccgttacttagtactatggcttccattaaagctgtccatcccaggttatttacatgatttacatcaatatttgttcgagtgaggagttcttttataacgtcaatatagccatgttctgaggctgggataagagctgttccgccgtaacgatttgtaatcgtaggatctgcaccagcatcaattgttaattttaaaatgtctaagtaaccttccgcaccggcgtatagaaagggattatttttcatgtcatcttggatatttacgtcagcaccagcttcgataagtgcctttgcggtttttacatcatttttgtatgtagcaatcataagcggagtgcgtccttgactatccgtcgcatttatatttgcgccttgttttagtaaagatataacagtattcgtttcatttttttcagtggctgctagtagtgcagtctccatgtttatcatctccttttttacttcttgttcttgcgagcatccttgtaaaaaaattacgcaacatatcatactgaatgtttttttgaacatggaatttcaacctcctaatttcaactgtaaaataggaacattaaatttttataaactgacgctaaaattactataaaatcgcttgagtaattgaacatatatttttatgcttataaataataaggtttgataaagtgaggatttaagatatgtctattaaaacaaggtttttattttcttatattgctgttatcctcgtttccattacgcttatattagtcgcgggatttttaatcgttttttcgataacaggtgacttggaagcagtgaaaaatttctataaaagttcttacattcaaaagccgcttacaccagaagaagagaatgcctatcttgagttgaagtcagcagccaaacagcatcaatctcaattgctagatgagtcgtttgtctcagcaatagaaaaagagggtgtgaaaatagtagtaagaaaaggagaaacactttcatatgcttcaaacgtatttgaaagtgtatctttaaaagaagcccttccgaaatttgaatcagcaaatattaatagtcgtggtacaacggaactaggcgatacattttatcgatatgtaaagtttgatttttattttcctcaggaagaagagggaagtatatttgtattaaaaaagcaaagttcatttgtagatcttacacaaaaattatttccaatcttattcgtatcgcttttactactagccattttactcattggattattaagttacctcgtttcaagaagtgtaataaaaccaatttttgtattgaaaggcgcaacggagaaaattaaagaaggaaatttagattttcaaataccaattacatcacacgacgaaatagggcaattaaatcaagggtttgaggaaatgaggaagagattaaaagaatcgatagagatgcaaacacagtatgaagaaaatcgaaaagagcttatttcaaacatctctcatgacttaaaaacaccgattacatcaattataggatatgtagaaggaataaaggacggggtagcaaatacgccagaaaaaatggataagtatttaacaactatccatacgaaggcaaaacatatggacacactcattgatgaactctttttgttttcgaagctcgatttgaatcgagttccattccagtttgaaacagttgaattaaatacgtttatgcaagaattaatagaagagatgcagatggatttaagtaaagaaggtatagaagttaacttacaattacatgcatcaacactatatgtaacggctgattgtgaaaaaataaatagagtgatatcaaatttagttcataatagtgtgaaatacatggataaagaagagaagaaaattactgtaacagtatcgagtgataataataaagttattgtgaaagtgatggacaacggatcaggtatagaagctgatacattgccgtatatctttgaacgtttttatcgtgcagagcaatcgcggaattctagcacaggtggaagtggacttggtttagcaatagcgaagcaaattgttgaagaacatggcggggaaatttgggcggaaagcgagcttggtaaaggcacaagcattttcttctcattggaaaaagtagaggaatgtggtgagtaaattgaaaagaattttattaatagaagatgaagtaagtattgcagaattacagcgagattatttagaaattaatgatttccaagttgatgtagagcattcaggagaaataggtttacaaacagctctgcaagaagactatgatttaattattttagatattatgcttccgaaaatgaacggattcgaaatttgtaaacaaatacgtgctgtaaaagatattccgattctacttgtttcagcaaaaaaagaagatatagataaaattcgcggactcggattaggagcggatgattatataacgaaaccgtttagcccgagtgaattagtcgcaagagtaaaagcacatattgcccgttatgaaagattattaggaaatgtaagtaagcaacgtgatacgttatatattcacggaatttctatcgatcaacgagcgagaaaagtttttataaacaatgaagaagttgcgtttacaacgaaggaatttgatttattaacattctttgttacacatccaaaccaagtattaaataaagaacagttatttgaacgcatttggggattagattccgctggtgatttagccactgttgtcgtccacattagaaagctacgtgaaaaaattgaaagagatcctgctcacccgcaatatattgaaacagtatggggagctggttatcgttttaacgtgtaatatacctgccgagtaattggcaggttttttatgttatttgtcaaaaggaaataataggtaatttgtgttaagatataaagagagataaaacatagtagagcatgagagggtgtgctacattttgggagatacattacaagataataaatcaaacaaggtcttaaggattggaactaatattataattattttattaattattggtgcaatacaaatgttttatgataaagattatacaaatgatcatttcggctggttatttttagtattaggttggatagttagaagcatttttaatattacgataggtttaaaagaaggagataaaaagtcagtgttgtttgatgtaggtttggtgctcttttccttttatcttttatttttatatagtacgaaatatttcttctgaaaatttagctcatagtcttatagagactgtgagctttccttaataataacggtactggcgtaacgatttataaaatatttgagtagtagaagtaaacagggtcgcttcttctaaaaaaggataatggttgctgttttcgaatggaatgaagatagagttacgtatcccatcatgtatctcgatagaatattgaactggacactgcacatcatatcttccgcatataataagtgtctttgtttggatgaaaggtaaatactctcttaaatcaaatgaaggatattcattggcgaaagcgttcatccggctaacggacattgttttattgattggtttacaaaaataagagttgtagttttctggtttatacaatgataattttgttctctcagtagatagttcttttcgttcttcacttgtaaggtgagggctttttaagttttcgatgtgtttttgcatataatgaaactgtggatgtgctgggtgataaatgcaaaatggtgtttcggtatagttacttgctgcagctcctgctacgactaatgattgtaaggaatttggatatgtaatcgcatataaaagtccaagcataccacctgttgaatgaccggcgaaatgccatgttggaagttgtaatgcttctcgtattgcttctaagtcgtggattgtttcaatcatgcttaattcgttttctgactgggcggttacagagcgaccagtatctcgtaaattaatgagaaatacacgatgcgtagcagtaaaaacatccgcaaagtaatcaccagtttcattaaattgtgaatagtgatgtgtaatacaaagcgattcgccatttccttttgtaaagagttcaaatgtaccgcgtttcgtgttgattatttgttgtgtccacataatatcacgaccttttctcataaaagttgggccagactgttataaaatgaaaatatatcagcgattattagaatatatcggcgcaactcggaatatatcagcgattatcaaaatatatcggcgtaactcggaatatatcagcgattattaaaatatatcgacttaccgacagaaaacgacaataatagcaagctttaaataaaaggaggctattcaaaaacgagcctccttttcgtttagtataaagattttgtcatattattccgaataatttcaagggatttcgctacagttaatgcgtttttttcttcaatttctggtttacgggggataggtttatacatgttgtctggatcttcccatgtgaggggaagttctgtttctgcttgtcctttccaagcttcaatccattctggagggagataacctgagatgttttggatgttgttcatttcgagccaaatgagtgcccatgctcttggtacgacacgccaatggtcatagccgccaccgccgacagcgatccagcgaccttcgcaatattcattagcaatttcacgagcgagcttcggtatttcgcggtaaatattcattgtcgcacaaagatgtgtaagtgggtcataataatgtgcgtcagcaccattttgcgttaaaataatatccggtttaaagtacgctgcaacttctgttacaacagttcgatatgattctaagaacgattcatcttctgtaaaagcatcgagtggaacattaaaagaataactataaccattaccttggccacgttcgtttacagcgccagttccagggaataaataacgaccagtttcatgcagtgaaatggtgcatacgttagggtcatcataaaacgaccactgtacgccatcaccgtgatgagcatctgtatcaatatataagacgcgtaaaccgtatttcttttgaatatattttattgcgatagaactgtcgttataaatacaaaagccagatgctttgccgcgaaagccgtgatgtaagccgccgcccaaattaagtgcgtgttttacttttccggaaagaacagcatcgacagctgttaacgtaccgccaacgagcaatgcgcttgcttcgtgcatatttgggaacatcggtgtatcttctgttccgagtccatatgtcattgcaattgatttttctaactttccttctccagcacgttttaccgcatttatgtactcctctgtatgaacgtaggcgatctcttcatctgtagccatccgtggtgagatgatttgagagggagagatgaaaccgcccttttgtaataaatcatacgtaagtgtgacgcgcagttggttaaaaggatgatcagggctaaatgaatagccccgaaagtcatccgaataaataaacgcgctactcatgcttgcatccccatgatgtttggccataatacgcggtaaccttctgcttcaagtgcatcaatcacttttagaggattcatcgtttgaatgcggaaaacgagtactttatcattctcgtcttttgctgggtagacgagaacgctcacgatatttatttgtaaatcactaaaaatagcaacgacttttccaagaataccaggttcgttttttacttgaatttcaatttgcgaacttggttgatgtgctcctgttaattttactaatgtgtgcagtactgtagattcagaaatgattccaactaacttcccggcctttgtaacaggaagacagccaattttattttcaaaaaataaagtagcaatttcctcaacgaaatcgagaggatggcaagtcataacaggatgtttcataataagttcgagcggttgctgtagcatatcgattgaaacttgttcatctagaatagacggacttgcatctcttacatcccgatcagaaataatgcctacgacgtgattattttgatcgacaattggaatgtgccgaatgcctttcgtgcgtatcgttcggattgctgtttcgattgtatcgtttggatgcaatgtaactacattttgattcataatttcttctacaatcattccagttgccccctttattaatacataaaacgattgtgaaaacgtagacgatcaaaagcttgaatagaatccgtatcaacgcgtttaccgatgcggaccattaaacagttggcaggatgtgaacaaatttcaggatcgtctgtagccatccattgtaacccgccagcattcatcatcttctccattacttttcggtattcccacacattcaatcctgtttgtttcaaatcccagtgccaataatattcagtcgtcaatataatgtaatcttccatataatcgtccatcatagaaacctctagtaagttctttccgacagaactcccgcggaaggctgggactacttcaattgccccaagctcaattaagttttccatttttccttctgaccatcgttcaagtggatcaggatacaagtatgtaacatatccaacaattgtttggtcatgtctagcaataatgagacgagcttctggtaatttagaaatttcgacaattgctttatattgttgctcggcaggacgaaacgcaattaagtctggatgaaactcatacatttctaagttatgtgtagagacaggaccttcaataattaaagtgcctttcgccgtttttaagtttctagcattatatatttttttatgaatcaatgtattgctcaccaccttgagggtttgtgaatctattaatatcgtactttataatatatgcgatgtgaatcgaaatttgtcattaaaaatttgtctaaaaatcaacaaatatactgaaaattttaaataatgtcattataatagataatagaatacataggagggggatgtaaagtatgaaagtagaaacgcttcctgtcattaaaggagaaaataatttgccgaattatgatgaggcatacgcgaattttaactgggaagaggttaataaaaactttacttggaatgaaacaggccgagtaaatatggcgtatgaggcaattgataagcatgcgaaatccgatcgaaagaataaagtagctctttattatcaagatggatcgcgaaaagagaaatatacatttaaggaaatgaaggatttttctaataaagcaggaaacgtccttaagaattatggcgatgtagaaaaaggcgatcgcgtttttatttttatgccacgttctccagagttatatttcgcacttttaggtgcagtgaaattaggagcaattgttggaccgctatttgaagcatttatggaaggcgcagttcgcgatcgcttagaagatagcgaagcaaaggtgttaattacaacgcctgaattgttagagcgcgtaccattaaatgatttaccggctttaaaaacagttttccttgttggagataatgtagaagaaggcggtaaaacggtagcgttcaatcctttatttgaacaagcttcaaaagaattacatattgaatggttaggccgtgaagacggcttgattctacattacacgtctggttctactggtaagccaaaaggtgtgcttcatgcgcaaaacgcaatggttcagcactatcaaacggcgaagtgggtattagatttaaaagaagacgatgtatattggtgtactgctgacccgggctgggtaactggaacagcttacggtattttcgcaccgtggttagttggagcgtcaaacgttattttaggtggacgctttagtccagaagcttggtatgaagcactgcaagattacggtgtgacggtttggtacagcgcaccaacagcattccgtatgttaatgggagctggacaagacgcaattaaaaaatatgacttatcacaagtgcgccacgtattaagcgttggtgagccgttaaatccagaagtaattcgctggggtatgaacgcatttggacttcgtattcatgatacgtggtggatgacagaaacaggtggacaagttatttgtaactacccttgtatggaaatccgtccaggctcaatgggtaaaccaattccaggtgtgaaagcagcgattgttgataatgaaggaaatgaagtgcctccttacacaatgggtaacttagcaattgcgaaaggttggccatctatgatgcgtgggatctggaataacgagcaaaaatatgaatcttatttcatgccgggagattggtacgtatcaggtgactctgcctatatggatgaagatggatacttctggttccaagggcgtattgacgatgtaattatgacgtcaggtgagcgcgttggtccgtttgaagtagaaagtaaattaattgagcacgctgctgttgcagaagctggtgtaattggtattcctgatccggtgcgcggcgaaattattaaagcatttatcgcacttcgagcaggatacgaaccatctgatgaattaaaagaagaaattcgtcaatttgtaaagaaaggcctagcagctcatgcagcgccacgacaaattgaatttagagataaattaccgaaaacgagaagtggtaaaattatgcgccgcgtattaaaagcgtgggagttaaacttaccaacaggtgacttatcaacgatggaagattaagagagaaaggtctgaacgaaaaatgttcaggcctttcttttttatgatatcatgaacttatatatataagttaaaggggatagtatgatgaaaacagaaaaagaaaagatgatactaggtgaaatgtacataccagctgatccagttttagttcaagagagggagcaagctcgtatattaacgagaaaattaaatgaaacgccagaagtacaattaaaagagcgtagcgaaatcgtaaaagaactattcggaacgactggagataacattcatcttgaatcttctttcagatgtgattacggctataacattcatgtgggtgaaaatttttacgcgaactttgactgtaccattttagatgtatgtccagtaacaatcggagtgaactgtatgttagctccaggtgttcacatttatacagcaacgcacccgcttgatccggtagagcgcataagcggatcagaatacggaaaaccagttacaattggcgataacgtatggattggcggaagagcaattattaatccaggtgtaacaattggagacaatgcggtgatcgcatctggtgctgtcgtaacgaaagatgtgcctaataatgtagtagttggcgggaatcctgcaaagattataaaaaaactaaaataatatttgaacgaagtgccttcctcgtctgtatacatttatgaaagaatagatgagggaggcttttatatgtctaataaattacttcttacttttgctgtaattggaattatagttgtattttcttgtggtcttttcttaccgataccaattggatatagagtatcaatgcttacagctggagttataatgggtgttatgttttcaatcattattccatttgatagaaaacatatagtacggaaaaatggatataaaattgattttacaaaaacaaaagtgtattttcgctggaatgtatttgacactatttctatctgccttgcgttgtatgcatgcatatgtgtgcaagcgttaaatactttagttactatgggatttacgattcaaaacccatatgtgcaattttttacaaatcaatcacaattgtggatttttattgcgattgcatatttaatttcccgtatttcattaacgttaaaaggaataaaggagatcaaaaatcatggcgcagattgggattgaggaggagctcatgcttgcgtatcaaagtggagataaacaagcgggagaaagactatatgttttaatcaaaccagcgctatacacatttttatatcgatttaaccgagatgaacaattaagtatcgatcttgtgcaagatacgtttttgacgctagagcgtaagaaacatatgtatgaacttgaaaaaggtaaaataaaaacgtatttatttcaaattggttatcgtcttatgattaataaattaaataggagaaaaaagtggcgtacgcttttgccatttttagtgccgattccggaaaaagaattttctcacgaagatcggctcacagtaagagaagcaattttgaaagttccagaagagcaaagagcggtcctaatcctttcttattatcatgacatgcagcaaaaagaaattgcagagatattaaacattccgattggaacggtgaaatcgagacttcataacgggataaagaaattgaaacaattgctggaggtggacgaaattgagcgaaaatccctttaagagtgaatataagttaaagcaacatttagatagtgatcatgtagaaataccagactttccaaaaacggtaagtcgattcgatcgattaatcgggtttcttggttccccagcgaaagatcctgtggaggcgaccattgggaatgatttatcgattgtgtttcatgtatcgttattagttggggttccaattctttctcttattacgatactctttatggtgttgtaaaggattgacaagaagggaaacctgacctctatttgacatgcctatataaatgatggtataaagaaaagtatatgaataattgagcgtggaaagggagaagtagtgatcatttccctgttttagagagctgatggccggtgaaaatcagcacatagatgatcgcgaattacgcccctagagcatcttttttcgattgaattttattcaaaagggaaaagacggtgctaagccgttatgtaaataaggtggtaggcttttttgcctgcaactagggtggtaacgcgataatcaaaatcgtcccttatttgaaggggcgatttttttatgttttcaaccttcacgccagtaatgaacttaaaggagagtatgtaggatatgggtattttacaagatcttgaatttcgcggtctaattaatcagcaaacagatgctgagggccttgagcaattattagaaaaagaaagcgttaaattatactgtggtttcgacccgacagcggatagcttacacattggtcatatgttaccagtattaatgttacgtcgtttccaattagctggtcaccaaccaatcgcacttgttggcggtggtactggtatgatcggtgacccgagtggtaaaaaagcagaacgtacattaaatacgaaagatacagttgcttactacacagaaagcattaaaaaccaactttcaaacttcttagagtttgaaaacgtggacaacccagcaacgatggctaacaactacgactggcttggtagcttagatgtaatttcattcttacgcgatatcggtaaaaacttcggtttaaactatatgttagcaaaagatacagtagcatctcgtttagaaactggtatttcattcactgagtttagttacatgattttacaatcatacgacttcttaaacttatatcagcaacataattgccgtctacaaatcggtggtagtgaccaatggggtaacattacagctggtcttgaattaatccgtaaatcagaagaagatgcgaaagcattcggtttaacaattccactagttactaaatctgacggtacgaagtttggtaaaaccgaaggcggcgcaatttggttagacccagagaaaacaactccttacgagttctaccaattctggattaacacagatgaccgcgacgttgttaaatacttaaaatacttcacattcttatctcatgaagaaattcttgagcttgaaaagcaagtagctgaagcgccagaaaaacgtgcagcacaaaaagcattaggttctgaaatgacaaaacttgttcatggtgaagaagcattagagcaagcgattaaaatttcagctgcattattcagcggttctgtagcagaactgactgcaagcgaaatcgagcaaggattcaaagacgtaccatctgtagaacgtactgcagaagatacagtattaatcgacttacttgtagaaagcaaaatctctccatcaaaacgtcaagcacgtgaagatgtaacgaatggcgcaatctacgtaaacggtgagcgtacacaagcattagactacgttgtaacagaaaacgaccgcatcgaaggtaaattcacaatcattcgccgcggtaagaagaaatatttcttaattcgttactaattagaaacgaatgtaaacaaatagtaccccgaattgtaggctgaaaagtctatgattcggggtttttatgtatggatttaaatcgccggatcttttcttttaaatagaatataaagaattaatatgagcatataaagtaaactaactagcataacgataaatgctgttggataaaattttgccgcatatataaagaaatcgatttgataaatatcttggtaatttgaaacggtgcctttaaagtaatttgtaaacttagcgctatatttccattcatcaggattatctattaaattactcccctgataccaactcatcagtgcggaagtaataaatagcataaatgaacttccgagttgaaccatttgatttattgtcaaaaagaatccacctcccattttatggttattataacgtgcattcatatgcttgtaaccattttgttgtaatctccttttcgagttcatacggaaatcacatgtaagcggtatgataaatgtataacaactagaaaggagtggtaaaacgaaatgtcactagaagcgctcattattttttctttgctaaatgcgggtcagcttgcagagaattcgaaggtggatgtacataaagagcagaaagatgcttatgtatatgttcagaaagaggaaaataaataactttaatatatataaataaaggctgccagagaaaggttttagtttctttggcagcttttctattgaaatgttttattcatcctcattttggaagcattaggtgactaaaacaactaatgtaagtttattaattataactacatctttatctttatctttttcgtcatcataatcaactgattttgtttttccacctacaaagttagctaaaatacttgttattgattctgagtctagtaatttgccgatctcaatattttgcttctttggcacatacccctttaaactccattttgtacattttgtatttcattcaatgttgaagacattatatctacataatctatcatagcacctatgtttaacttggctgtttcagtatcattttcatttaaagctataaatgcttggtctaccatttgtttaattgctcttgcatcgtctcttaattgaactttgaagtaatcatactccttaggaggttctatacttgctagtctattagctctcccacttactctacttaattctccctttaatcctgtttgagttgttttccacgttccatctttttcagctaaggatttaatagattgaactgccgtctttaagtcattagaagtatccttaatatcttcttgatacttctctaaaggagaagatgcactagaacctttagttaactgcttatctctatactctctttcctcagctagtgttctaccttctccaattacagcttcttttactgttttatcgtttgagacttcatttttatctgtatcctctttctttttcgttacctctttttcttccttagctttcttttcagcaagcaatttttccttttcagcaagcaattcttcctttttagcaagcaattcttctttttccttgtttagcttatctgcttctttgtctattgactcgtctttcttcttttctgactctgaaatctttaagctatcagtcttattctcttctgtattgttcttagaacatcctacccacgctactaacataagtggtaatgctaaaaaacatattagtttctttgctttcattgcgtatactccttttaaaaagaattgtaattaattaacatatgaaactataacataagttacataaataagatatatagatatttcatccttaagagggttttaacaatatgaaaacatgtattacggttgtggagaatcccactccgtatacttttaaaaaattcctttataaattccttagcgtttgggggcttttttatgctttcataaactctttatcaaagaagttgtttacgtaactgattatttttgtaagggtattaataaaactcaaagcgaacttatccatattcataatgaaagggtgatgaaatgattattagagaaggtattgaagtaactagaataactttagatggtatgaattaccgattccagaaggggattctgagtttctgcttcgtgctggatattgggaagttggtgaaaaagtagaaagaataaatcgtgaggaaattctggcggattatgacagaaaggtttttctggaagatggaaaattgtgtacgatactcacttacaaagggaataaaaagaaaagatgtgatagaggatgagtgaagaacaaattattcgtgatgaatatgagtatgtggtgaaagtaatccttacaaaggaacagcggaagaaatttttaacaccgttaataccagctgtacgggagctaattataaaaaggaaagtagaacaacgaaataagcaaaatgaaagtatgaaagaaggtgaataacaacattcttgatattaaaatagatgaacaaaagattgaagaacttttcttagaagagttacgaaaacggctagatcatattgaacatagaaaaatgttttgggatatgaaagaattgtgtagacaaacatgtatgagtggaaattccatcagagaaaattgcttttatgatgaacgtttcccgaaatttaaaatagatggaaagtggtatttttcagcgttagaagtggaaaagtttcttcttatgtagataaaagaacaatgaacaattttaaagaaagaagggctaataattattaattactaataagatgaatgtactacggacctacagaggttttattattttacttacacttatccatttctatacacacgccagccatattattttttgcccccagtacattcttttttatgctttatataaataaaaaaagcccaggaaccttgaattaacaaggttcctaaggcttttaatacgactcttttcagagtaccgagattaacgagagtagaactctacgattaatgcttcgttgatttcagctggtaactcagaacgctcagcgtgacgagtgtaagtagcttctaatttgtcagcatcgaaagttaagtattctggtacgaagttgttaacttcgatcgcttctttaacaacaacaaggctgttagatttttcgcgaacgctgatagtttgaccaggttttacacggtaagatgggatatctacgcgagcgccatcaaccatgatgtgaccgtggtttactaattggcgagctgcacgacgagtgcgagctaagcccatacggtaaactaagttgtcaagacgagcttcaagaaggatcatgaagttttcgccgtgcttaccaggcattttacctgcttggtcaaatgtgcgacggaattgacgctcagtcatgccgtacatgtgacgaagtttttgtttctcttgtaattgtaaaccgtattctgaaagtttcttacgttggttaggaccgtgaggacctggtgcgtaagggcgtttttctaattcttttcctgtgccgcttagagagattccaagacgacgagacagtttccaagctggacctgtataacgagccatagttgactcctcctttaaaaatgtttttatttacgtaaaataaaaacagacgtaatcgatatttacgggcattttgttttcatgtaccttcgctccagcagcagggagttacgagatacacctccgtagaggaacaaaatacaaacgataaactcacattacaaggctgcctttttattttacacaaacgctattatatcttttacccagagtttcgtcaagcgagtacgtttttgttttatgcatataaattttggaaattaatataagaaggaatttaaaacaatatagaagaagagatagaaacacaaataaagcgcttacataaaatgaaggaaaatgttcatcaaatttttatggatgaatatgcggcaataaaaacataagggggatgtttttatgaaaaagaagcatatggagacagcgttaattcatcacggttatacatctgaggaacataaaggaagtttaacaccacctttatttcaaacttctacatttacatttgagactgcgcagcaaggagaggcgagttttgcgggagtggatccatcttatatttactcacggcttggaaatccaactgtgaaattatttgaagaacgtatggcggtgttagaaggaggagaagaggcacttgccttcggatctggtatggcagctatttcagcgactttaatcggttttttaaaggctggagatcatattatttgttcaaatggattatacggatgcacgtacggttttttagaagtgttagaagaaaaatttatgattacgcattcgttttgtgatatggagacagaggttgatattgaaaataaaattcgcccaaatacaaagcttattttcgttgaaacaccaattaatccgacaatgaaattaattgatttaaaacaagtgattcgggttgcgaagcgaaaaggcttacttgttattgttgataatacgttttgttcaccttatttacaaaggccgcttgagcttggctgtgacgctgttgtgcatagtgcgacaaaatatattggtggtcacggtgacgttgtagcaggtgtaacaatttgtaaaacgaaagcattagctgaaaagattcgcccgatgcgaaaggatatcggcggtattatggcgccgtttgatgcgtggttattattacgtgggttaaagacgttagcagtaagaatggatcgtcattgtgataatgcagaaaaaattgtatcgttcttaagaaaacatgatgcggtagaaggtgtttggtatccagaaggggagttagcatctcgtcaaatgaaacgcgggggcggtgttatttctttttcagtaaaaggcggaaaagaagagacgcaagcgtttattaatgatcttcactttattacaattgcggtgagtttaggagatacagaaacgttaattcagcatccagcaacgatgacgcacgctgcgattccagcggaactaagaaaagaaatgggcattttcgataatttaatacgcttatcggtcggtttagaatcgtgggaggatatcgtttctgatttagagcaggcattaaagaaaatatctactgttaatcaatgaaaaaagagtgagctatcggttttgtacaggacgtactaaatcgataactcgctcttttctttttacatatgttttaggagtgtttccacaaacttttctaaatagcgctgatctaattcatcaaaacgatttttttcaggactatcaatgtccagtacaccaatgacagctccttctttcacaatcggtacaacgatttccgaattagaagcactatcgcaagcgatgtgacctgggaattggtgaacgtccgctacaagctgcgttgttttcgtttcagctgctacgccgcaaacgcctcgtccaaatggaatgcgtacgcaagcaggcattccttggaacggtccaaggacaagctgatttccttctgttacgtaaaagccaacccaattaacgcgatctaaaaattggtttaataatgcggacgcatttgataagtttgcgactacgtttgattcgccagttaataacgcatccagttgtttaattactgtctcatattgctgcacgcgagatcctgcataactttctttagtaaacatggaaacagctccttttttatcgagatgtgtaaaatattagcaaaatacgatgtatttcacatgactttgtcgatagaaaattaaaggaatttgtcttaaaagtcaagaaatttaaactatagctgttcattgaagggaagtgagcgcatgaagcagacgaaacaaaaagtaattgatgcggcaatatcgttgtttaatacgaaaggttatgatggaacgtcggtgcgagacattgcaaagcgagcggatgtgaatgtagcgaatatttcatattattttgctgggaagcaaggtttattagaacagcttattactgattttttagaaggatatattcatgtgattgaaatgtcgtttgaacagagagagtatttgtcggctaaagatgtgatggtgcaaatggtgcgagggattttacgatatcaatttgaaaatagagaactaacacgtttcttctaccgagagctttcgcttgatacgacattaattcgtgaagtgatgaccgtttatttttctaaagaaagatattatatagaacaaatgattagacaaggacaaatgaaacaagaatttcagaaagtatcatttacaatgtttatgacgcaattaaaaggtatgataaatatgccgtttttatatccacaatatatatcagaagtactccattctttcccgtctgagacattttttatagagatgtacacgaaagagattgagcaatggatggaacaagcattatgtaaagcgaatatgtaccatgaatggccaagagctgttcatatgtgaagaatccccacctaacgaactgaggtggggatttttatgtttacttttctttgccataaattgttacataatagcgcgataattgttaatgcagctccagcgatttcaattttatcgactgtataacctcgaaagatagaaccaatcagtgcaaggataggaactaaattcataaataatatgccgttaatagatgaaatatagcgatttcccatattccagcaaaatacagcgataacgcctgcgataatcgacatataaaagagttcaaaacgaacgctcacaactgtacgcagtgacggcatagtaactatatttgtgtacgttaagaaagtaacaataacgatgagtgaaatggagccaaataaacaagttaatgtcgtgtacctaagtggtgaccaagattgaaaacgagcacccccgtttgtataaatgacccagcaagtaacgccgcatagcatcaatatatttgttgataagtggcttgcagctccaaatagtaattcaatatttccttttgaaatgacaagcataacaccaagtaatgcaacgaacatacaaaggaatgtatagttttgtgggcggcgatttttcgttatccattgcagtgataaggcaatcagtggcataagggattgaatcatagctgcatggattgctccggaaggtccggcaagttgttgtccgtagaaaacgagaaaaccataccccgcgaaaccgactgtcccgtaaaagaatagagaaagtgttcttttttctaagcggagtgaagtctttccttcagtaattaatagcaaaataagaaaaataatagctgctgatccatagcgaagcgttgtgaagaagaatggatcgataaattgcagagcatttgccattacaggaaacataaatccccaggcagtgacggcgagtaagcatagaaaggatccgagtagcatttgttttttgttcaagagtatctttcccctttacatttcgttatagtaagttgatgaaataagtataaagagtaattgtttataggaggaaatatcgatttcttataacggttataactttttgttagaggtgtgtacgatggatttggaggcagtacgatcgtttattgaagtgaagcatacgcgaagtttatcaaaggcaagtaagattttacatatatctcaaccagcgcttagtaaacaaattcaaaagttagaagcggatttagaggttactttacttaagcgttcggcgcaaggagtagagttaacggaggcaggagagttatttataaaaagaatgttaccgattttggagcaaataaatgaagtgaaaacagaaatgagggggtatcaagagaaccggaagttttcaattggtatactaccgagtttagcggagcattacatatcagaatgtaaagatatattaggtgatgagttcgaagtggaatggcaaatcggtcatacggaagtattaagagatttatttaaagcgcgggagattgacgcgatgttcatcgattcagtagtagaaggtgttacgtatataaaagaagtgcaacaagagaaaattgtttgtgccgtttcaaataatcatccgtacaaagagaaggtagtcattcaaatagaagagctgcacaatgaaaaattaattgtatatccagaaatatgtgatgtaaggaaaatgattatgaacatgtttcatgaaataggtgtaaaaccaactatagctgtggaaacatcttacgcagaaccgatgcttgcaatggtaaaagctggccttggtatcacgttacttccagaaagggcagtagagcagtctgtaaggcaaggaaatgtacatgtaatctctgttgaaccaccactcatgcggaaaatttatttcgtatcccatacgaaagattgtttgttattacaatcatttgaggataggtagtgaggtaggcggaatattgagaaagattacaatcacattgaaaggaacatgaaatttttaaaaaaactaggtcaaaaacaaaccattacatggtatgattagtacattgttagttgttaaatataggggaattccctttttatacataatgccttccatttcataaacggaacggacaaaaaaagagatataactaggaggcttttttgcatggattctatcctgacgatcgttatcattgtagtaagctctattctagtgctgctcatgatagagcttgtgataagaaatcgttcatataaagatattgaagcactggagcagtggaaacaagagataaaagataaacctgtggcagatgaattaaaacgggtaaaagatttaaacatgacgggtcaaacagaagaactgtttggtaaatggcgtgaagaatgggatgaaattgtatcaacaacccttccgaaagctgacaaagatttagcgcaagcgcgaaaattcgcctcgcaattctccttccgaaaagcaaagcatgcgatgaacgaatccataagtggtttagatgacgctgataatcgtattacggacattttaaatgaattacagcaattgttagaaagccatgagaaaaatagctcggaaattgaagggttacgtgatacatatcgtagtatgaaaaagagtgttcttgctcatagacatatgtatggagcagcagagcagaaaatcgaagagatgctagacgctgaatctgagaaatttaaaacctttgaagaagcaacaaacaatggcgactatttaaaagcgagagaaattgttattagtttggaagaaggtttagcagatttagaaatcattattcaccaaattccagatttattggtagagtgccaagcgacgttaccagttcagctggaagatttattacacggacataatgatatggtaagacaaggttatgtattagattatttggaagtccctaaagaagttcgcgatatgacgaaacaactacaaacatgtttaatggatatacaggagcttcatataacagaagcggctgaaaaagtagaaaacttaaaaacacgtttagatggcttctacgatcaattggaacaagaagtacatgcgagacattatgtggagcaaaaaacactttctgtttacgatgacttagaagaaatgcgtatcgaaacgattgaaacgaaaacagaaacacaacttgtgaaacaaagctatcagttacaagataaagacattgagtctcaaaaagtaattgaaaagcaaatgcacattttaacgaaacgttttgaaatgctgcaattacgcgttgcagaacaagatattgccttctctattattcgtgaggaactagaagaggtttatgagcaatgtgaaacgttaaaagtacttcatgcagaatataaagaaatgctgcaagcgatgcgcaaagaagaatttgaagcacgtgagaagttacaagaaatgcgaaatattattttcgaaacgaaacgctttatgcaaaagtcgaatttgccaggtcttccagagagtattatggaagatttaaaaagagggcaaatggcaatgcaagctgtatatgaacaattagaagtgaagccgttaaatatgaacgctgtaaatagcagtttagaagaagcatacacaactgtgaacggtgtagctgaaatgacagaagagttaattggacaagcatatttagtggaaaaattaattcagtacggtaaccgttaccgtagtcatgatgaaaacctagcagaaagtttaaattatgctgagaaattattccgtgaataccaatacgatgcagctttagaacaagcggcttcagtgttagagcaacttgaacctggcgttgttcaaaaaatagctgaatatgtagacaatgaacaaaccctttcataaaagggtttgtttttttatgtaattttgcaggcgatgttgctataatgaatagcggaatacagtaaggttattcgtttcaaaataaagtgaaactgtaatcggtgggaagattcatccccactgattactagccttcaccaatcgggcatttacgggcagttaatctcccatctaacttctttgctctaactggattttgaggtgagagtcttattgcccgttaacgcgggataaagtgaaactgtaataggagggcatcctcgccaattattagccttcaccaatcgagataaaacggaacctttgcgtagtcttagcgtaatgacacgtatttatgatatgattatacgatgtgatagcgctgaaaggggaagaacgatgatctattttgataatagtgcgacgactaagccatatccagaagctcttcaatcgtacgtgacggttgctgggaaatattttggtaatccttcttctattcattcgcttggaggagaggcagagcgtctattaacacaatcaagaacgattgcagcgcagcttcttcgtgttaaaccttctgaaattatttttacatcaggtggaacggaagggaataaccttgcgattaaagggatagcgatgaggaatcgttcgcgtggtaaacatatcattacaacaaatattgaacacgcgtctgtgtttgaagcatataagcaattagaagaactcgggtttgatgtaacatacttaccggttaacgagcatggtgttgtatcggtagaagatgtgaaacgagcgcttcgtgaagatacgattcttgtgtcaattattcatgtgaacaacgaaactggagcaattcagcctgttgctgaaattggaacgttattatcgaatcatccgaaaataagattccatgtagatcatgtacaagggataggaaaagtaccgcttgatttatatgcttctcatattgatctttgctcaatatctggacataaattccacagtgtaaaaggaacaggtcttctttatgtacgcgatggcgtaagattagatccgattttatcaggtggtcaacaagagcttaagtatcgctctggtacagaaaatttacctggcattgtagcgatggtgaaagcacttcgcatgacaatggaacaagtgaaagaaaaggtagctcatttgcaaagtttacaagcagagcttgttcgtttctttaaagagatggaagatgtaacgattaacacgtcgcttgcatatgcagcaccgcacattttaaatgtatcatttgttggtttaaaaccagaagtagtcgttcatgctttagaagaacacggtgtatatgtgtcaacgaaatctgcttgttcttcaaaagcaaatgaagtgagcagagtgttagtgtcaatgggagtgccgcatgcagcagctgcaagcgctattcgtattagtttagcaccagaaaacacaatggaagaagtaaaacaatttgaaggtattgtaaaagagacgatgccaaaattatatgaagtgatgaggtaaagaaattatgttgaaatatgaatatattttagtgcgttacggagaaatgacgacaaaaggtaagaaccgttctaagtttgtaagcacattaaaagataacgtgaagttcaaactgaaaaaattcccaaatattaaaatcgatgcaacacatgatcgtatgtacatccagttaaatggtgaagatcatgaagcagtctctgaaagattgaaagatgtattcggtattcataaatttaacttagcgatgaaagtaccatcagaattagaagacattaaagaaggtgcattagcagctttcttacaagtaaaaggtgatgtgaaaacatttaaaattactgtacaccgttcttataagcatttcccaatgagaacgatggaattattacctgagattggcggacacattctagaaaacacagaagatattacagtagatgttcataatccagatgtaaatgtacgcgtagaaattcgcagtggttatagctacattatgtgtgatgagcgtatgggagctggcggtttaccagttggcgttggcggaaaagtaatggtacttctttctggtggtattgatagcccagtagcagcttacttaacgatgaaacgcggcgtatctgtggaagcagttcacttccatagtccacctttcacaagtgagcgtgcaaaacaaaaagtaatcgatttagcgcaagagttaacgaagtattgtaaacgagtaacgcttcaccttgttccgtttacagaagtgcaaaaaacgattaataaagaaattccatctagctattcaatgacggttatgcgccgtatgatgatgcgtattacagaacgtattgctgaggagcgtaacgcacttgcaattacgactggtgaaagtcttggacaagtagcaagccaaacgttagatagtatgcatacgattaacgaagtaacaaactacccagttattcgtccgcttattacgatggataaattagagattattaaaatctctgaagaaatcggcacgtatgatatttcaattcgtccatatgaagattgctgtactgtatttacaccagcaagcccagcgacgaagccgaaacgtgaaaaagcaaatcgttttgaagcgaaatacgatttcacaccattaatcgatgaagctgtagcgaacaaagaaacaatggtattacaaacggtagaagtagtggcggaagaagaaaaatttgaagaacttttctaaaaccataaattaccatatttaaaacgtgtatgaagtcatgttatttatcacactctatactcacaaggaggtgatataacatgtcacgtagcacaaataaattagcggttcctggtgctgaatcagcattagaccaaatgaaatacgaaatcgctcaagagtttggtgttcaacttggagctgatgcaacagctcgcgctaacggttctgttggtggtgaaatcactaaacgtctagtttcactagctgagcaacaattaggcggttaccaaaaataatcccatatgatggcttagaaagagcgggttctcccgctctttcttttttgtgttgccatttgtcggtaagttgatgtaatttcatttagtaattcgacagaactgaaaaatttgtcaaaagaagagggttcaaaattaacagaaaattctttattatataaaggaggcataaagaaaagggaggatattttatgaagagagaagaattgttggcgccaccgtcttataatttagtttctgaaatagagaaatatacgggtgataaagggaaattagctttaatttggcaagatgataaagggaatcgaagggaagttacatacgctgaattaatgcaaggtgcgaataaaattggaaacgcttttataaaaagtggtttgcaaaaaggggacaagcttctcattatgatgccgcgtttaattgaagcgtacatgacgtatattgctgctattaaagcaggatttgtcgtaattccaagctcggaaatgttacgtaaaaaagatatagaatatcgaattggacatggagaagtaaaagcgatagtaagctatgagccgtatattaggcagtttgatgatatagaagcgatggaatctcttcggaaatttgtcctgagcgagcagtcagtagatggatggattaatttaaaaacagcgttagaaacagagagtgacatgttagaaatggcgaagacagataaagaagatatggtctttttatcttacacgtcaggaacgacaggaaatccaaaaggtgtcgttcatacacatgcttgggcatacgctcatttacgtacgagcgctccaaattggctcggaattgaagagaatgatattgtatgggcaacagctagtccaggctggcaaaagtggatttggagcccgtttttagcaacgctaggatcaggggcaacagggtttgtatatcacggtaagtttgaaccggaaacgtacctaaacttattagacgataataaggtgaatgtactttgttgtacaccgactgagtatagattaatggcaaaggtagaagatttaagtcagtacaatttagaggcattacatagcgctgtatcagcaggtgagccgttaaatagagaagtcattggaacgttccaaaagcactttcatattacagtgagagacggctatgggcaaacggaaaatacattacttgttggtgtaatgaaagggatggatattagaccaggttcaatggggaaaccaacgccaggtaaccacgtcgatatcgtaaatgaggaaggtactccagttaaagtaggcgaagttggtgatattgcagttcacattgaaacgccggccctctttaaacaatattacaaagacgatgaacgtacagcgatgcaattccgcggtgattattatattacaggtgataaagcgaagaaagatgaagacggctacttctggtttgaagggcgcggtgatgatatcattattagctctggttatacaatcgggccgtttgaagtagaggatgcacttgtaaaacatccttacgtaagagaatgtgcagttgtcgcaagtcctgatgaaattcgtggaagtgtcgtgaaggcatttatcgtattaagagagaatatagaaaagaacgaagaaacattaattccaacactccaacaacacgtcaaagaactcactgcaccatataaataccctcgcaaaattgaatttgtagatgaactaccaaaaacgatttctggaaaaattcgccgtattgaacttagaaaacaagagatggagattccgtcaaaataattttgaaaacagtgaagtaaatagttgaatgaaatgcaaaacaatgataatataaaaacgaacacaagttcgattttataaacttaaaaaagaggtgtccgtatgattttaggtattaatccgtacttagttttagatggtagtgggcaagaagctgtacagttttataaagaggctttagatgcaaaagtagaagtcatgcaaacttttggtgacatgcctgaaaatccagaatacccgattccagctgaagcgaaagagcgcgttttacacgctactttaaaagttggtaatacggatcttatgatttctgatacattcccaggtcaaggacatgcaaacggatctcaagtaacaatcgcaattcaaattagtaatgcagaaaaagcaaaagaagtattcgataagttacaagaaggtggagaagttatcatgccacttcaagaaacattctggagcccagcatacggacaagtaaaagataaatttaatattgaatggcaagttacaacgtctactactgaacaaaagtaatttttagaaaagcaccatgttttgaaatggtgctttttttatacaataaaaaataaaggagatgggatatatgggagaaatttggtatggcggcaccatttacacaatgagagaagaaaatgaaaaagtggacgctgtttacgttgaaaacggcataattgttgatgctggtaataagggagaattagaaagcagatattcaaacgtaaagttacatgacctaaaaggaaaaacaatgatcccaggtctcgttgatagccatatgcatcttattgggcatggagagagattactccgtctagatttatcaaattgtacatcttatagcgaagtactgactcttgttcagaagcgagtggaagaagctccaaagggctcttggattattggagaaggatggaatgaaaataactttacagatacgaaagatgttcacgcgcgtgatttagatgaaatttcgaaagaccatcctattttattaaagagagtttgtcgtcacgttacatgggtgaattcatacatactgcaagaagcgaatataacagaagcgacagaagatccaaaaggcgggaaaattggcagagattcatcaaataagttaacaggacttttatatgaacaagggcaagaattaattaaacatgttcagccagaaattgatgaagcttatttacaaagagctctgcaaacagcgattaaagattgctggaaatacggacttgttggcgggcatacggaagatttaaattattatggtggttttagaaaaacgcataatgcgttttctcatgtgataaaagaaatgccatttaaagcccatttgctcgttcaccatgaagtagcacatgaacgaaaagaatatgaaaatgaacattatattgaatttggggcaatgaaaattttttctgacggttcttttggcggaagaacagcattattaagtgaaccgtatgaagatgcgaaggaaacgaatggggttgcgattttctcatgtgaagaacttgcagaattagtgaagaaagcacgagatttacatatgccagttgcgattcatactatcggtgatttatcgcttgaatatgtcattgatgcactcgaattatatccaccagcaaaagggttacgtgaccgcattattcattgtcagcttgctcgtgaggagttaattgaaagaatgaaaaacttgcaagtcattatagatatacagccagtctttctttcatcagattttccgtcagtcattgaaaaactaggagagcgccgtcttcgttatgcgtatgcttggaagacattactggaagcagggctacattgtaatggtggctcagatgcccccattgaacaagtaaatccgtttctaggtatatatagcgctgttacacgtagaagttttattgacggtgtatgctatatgcctgaggaaagattaacggtatatgaggctgtttctttatttacaacaggaagttcctatgcaatcggaaaagaagcgaagcgagggcaaattacaaaaggatatgaagcagactttacaatattagaccgcaatatttttgaaattgaggcagaagaaataaaagaagtagaagcagaaatgaccgtaatagatggccaagttgtctatagaaaaaatgcgtaaaaatatatcagcgattttcggaatatatcgactgtaactcgaaatatataagcgattattgaaatatatctatcgtaactcgaaatatatgagcgattattaaaatatatcgacttaccgacaaaaactgacaagaataacgggtggatagtaagagagtattgtccgcgccaatcggggtaaataaataaccgcagaattatggaattccataattctgcggttattttaatcctataaaaacgttctctgtactttttcccagaaagaattgttttttaatttaactgttttaatttgtttatcgcttaagcgtacaacagctttttccacttgtttaatgctaagcgcttcgttatccatgccgataacaggataatcgttaccgtctggtcttagttttaaagttaatgtacgttcgtgatttaaaatgaaaggtgaaccgagcgtacggtaagtgttgttgtttaaagatgctagttcgcttacttggaaacatggaataagtgggtcaacaactgcgccatgcaatgatttattgtaagcagtacttcctgttggggtagaaactactaaaccgtcacctctaaatgtttcgaaatataaatcatcaacgtgaacatctacaacgaatgtttttataatactagaacgtaatgagaactcatttaaacaatggaaagatgtactgtgatctacatctacctgaattgttggatatttacgcacttcaatttcattttttgtaatttcttgaagggctgtatcaacgtgatcaatatggaaatcacagtagaacgaagtttcatctttcgtagaaatccctgcgtataagcaatcttccctaaaaccagttttacgaacggtttgtaagaaggttgcatcatctccaacactgacgatagcgtttgcattttttggatgatctaatatggtaaatccattctcttctaaaatacgatagattggtttcattttttcaacgagcgttgctttgtcatcaccataaaagaaaaataaattgcgacgatctgccattatgtatccctccactgcagttaaattttctgtttttcgtgctacatatcattagagtccgttccctgatgatatgttcaaataatatatttcgatataaaatgtcaaaacacctttttatttttagaaaaatttttatattcaatcttatagaactctgtttaatgatgaataaagttgtcgataatgggtacggagtgaaaggatgatacgtatgaagtggctcgtaattggaataataattcttcttctttttattttgtttatactattgtcaaaaataaagcttaaggtgacatttttatattcagaaatggaaaagaaatgtttgcttcaagtgaaaatatggatgattcgatatacatttgatgtgttggaaagaattgaaaaacagcagaaaaagacaggacagaaaatcgaaaaagctgaagaggacggcggactcgataataaaattatggcgcaacttgacagcattggtgaactgataaaaaagcttcaagaagttcatactattgttaaagattttctcaaacgagtgaaaatcaatggttggaaatggcatacacaaattggagcaggcgacgcagctagtactggaattgtcactggatatgcatgggggacaaaaggtatggctgctggagttgtcggacaatatatgcatattgtcgacgtaccagaatttgaaattaccccagtttttcaaggaaaaggatttgcatcaagatgtgagttaacagcatcttttcgtatattccgcactataaaaacagcggtgaaattgctcatatttatgaggaagcaaagatctggtatgacagaaaaatctgttcaagcataggggggatatagaatggaacatccaattcaaggtttaatgacaacagcaatgcagcatttaaaacaaatgactgatgtaaatacaattgttggtgacccaattaaagcggcagatggaagtgtaattcttactgtttcgaaagtaagtttcgggtttgctgctggtggaagtgaatttggtaaagtagaacattcaggccgccatccatttggcgggggaagtggtggaggagtttctattaatcctgttgcctttcttgttataaatggagatggtgtgaaagtattgcacttagataaacaaacacatgtcatcgataaaataattgaattagcgccacaagctgttgataaagtgaaagaaatgatggataaacgaaaagaagatgatcctgaatttcaaatttaacgaataaagaagctaatcaataggttagcttctttaatttttttgtaaataaagcgattttatttgcattatcgatagggacaaactatcatttacattgtacatattttgtttaaataagggaggattttcaagtggcaaacgtaacttttaaaggtaatccaatgactttagttggaacagaagttaaagttggcgatcaagcgccaaacttccaagtattagcaaacgacttatctccagtaagtttagaaacatacaaaggcgaagtgaaattaattagtgttgtaccttcaatcgacacaggtgtgtgtgatgcacaaacacgtcgttttaaccaagatgcagcaggtattgaaaacgcgaaagtattaacaattagcgctgatttaccattcgctcaaaaacgctggtgtgcagcaaacggtttagaaaatgttgtaacactttctgaccaccgcgacctttcattcggtgaagcttacggcttagtaatgaaagaacttcgtttacttgctcgtgcagtattcgtagtagatagcaatgacaaagtagtttacgtagaatacgtaagcgaaggtacaagccatccaaactatgaagcagcattagaagcagctaaatctgcgaagtaatgtgaagaaaatgacctcttataaagaggtcgttttttctcatatattgctctgtaacggcatcgatatatgagaaaaaacgttatatcatatataactaaaggggagctctttacaggaggtcgctttttctttttggaaaaaatcactttgtggtatgatataagttatgtgtaaaagagagaaggaggaatgtacgtgagtcagacagtagaaacattattttctatttttgattcttctgcggtagttttacgtaaagaattagatgtaacatatttagaggcgcttgtagaaacaggtgataacttgtttgagggagcgattttacaagaggaattatccgaatcagcaattgaaaggctgaatcgtgaatatagtacgtttaatgaagaaacatataaaggtgaagaaattcgtaaagcatttcagttagccatcttaaaaggaatgaaagaaggcgtacaagcgaatcacgaaatgacacctgatgcagttgggatgttcatgagttacttattccataaatttatgcaaggtcaaaatgaaattacagttttagatcctgcaattggaacaggtaacttaatgactacagtgtttaatagcgctaaagaaggactaacaatgagtggatttggtgtagaagtggatgaagtgctaattaaacttgctttagtaaatgcaaatttacaaaagcatgcaatcgaattcttccatcaagatggactagcaccactttatatcgatccagttgatgcagtcgtttcagacttaccggttggttattatccaaacgaaatcggtgcaagtgaatataaattaaaagcagatgaaggaatgtcgtatgcccatcacttatttattgaacaaagtgtgaaacatacgaaagagggcggttacttattcttcttagtaccaaacttcatttttgaaagtgaccaagcaccgaaattacatgcatttattaaagaaacatgctttattcaagggttattacagcttcctgtttccatgtttaaaaacgagaaaaatgcaaaaagtatatttgttctccaaaagaaaggcgctaatgtaacaatgccaaaacaggcgttattagtggagttgcctaaattctctaatatgaaggcgatggaagacattatggatcaattaaatacttggtttgcaacacataaataaagctaggtatatgtaacagcattagtgatttatgtagtacagttttatataatatgtcatatttttaaatatatacaagatttaactgaatttttttgaaatctgtaatatatattttttcttggtgttacaattttttcacttgaaatatatgtcggacgatgtttaaattaaaatcgtgagtataaaatttgctaatgatgaaacgttttcatatttagtgaatttgatcagataaaatcgagcggtttgtggaaacatccacacaactaccaagagaaaaaggggcgaaagactagatgtcaaaaatcatcgcgattaacgcaggaagctcttccttaaaattccaattatttgaaatgccaagtgaaacagtattaacaaaaggtttagtagaacgtatcggtttagaagatagtatcttcactattactgtagatggcgaaaaacaaaaagaaattacaaacattccagatcacgcagtagcagttaatatgcttcttaaaaagttaactgaaaacggaatcgttaaatctctagatgagattggcggtatcggtcaccgtgttgttcacggcggcgaaaaatttgctgactctgttttaattactgatgaagtattagctgatatcgaagaattaagcgatttagcaccacttcataacccagcaaacgttgttggtattaaagcattccaagaagtattaccaaacgtaccagcagtagcagtattcgatacagcattccaccaaacaatgccggaatctgcattcctatacagcttaccatatgagtactatgaaaaattcggcatccgtaaatacggtttccacggaacttctcataaatatgtaactgagcgtgcggctgaattattaggtcgtccaattgaaagcttaagcttactttcttgtcacttaggtaacggtgcaagtatcgcagcagtagaaggcggtaaatctattgatacttctatgggcttcactccacttgctggtgtaacaatgggtacacgttctggtaaccttgaccctgcgttaattccatacatcatggaaaaaacaggccaaacagtagaagaagtagttaacgtattaaacaagaagagtggtatgttaggtcttactggttactctagtgacctacgtgacatcattgcgaaagaagaagaaggcgaccaccgtgcgaaagtagcacttgatgtattcgtaagccgtatccacaaatacatcggttcttacactgctcgtatgaaaggtgtagacgcaatcatcttcacagctggtgtaggtgaaaacagtgcgattattcgtgagcgcgtattagaaggccttgagtacatgggcgtatacttcgatgcaaaacgtaataacgtattcggtgaagaagcattcatcagcttcccacactctccagtaaaaattatcgtaattccaactgacgaagaagttatgattgctcgtgacgtactacgtcttggagatattggttaatatatgaaaaaaaagacgagatcctataggatttcgtcttttttcttttagatgtattttaaaactccatccggatataatattttttctttctgaatgaatgccgtaataggaatccatttcgcatatgctactgtttcctcatcttgtatatttaatattttcatttcatatagtgacgtgtctaataaacgcaaagaatatagttgaataatttcatgaccaatgtctccatctagatgaaagacattttctaaacagcctaaataattggtgatttccacttctgtatgaagctcttccctaaattcacgaataacggtatgtgctgattgttcaccaagttcaattgaaccaccaagaggtcggtaaaatgtttcatcggctgaatgatattcttgtacgagaagacgcccgtgatgtatagcaatgccaaaagcctttgcacgtggatacatatacaatcactccttatttttttgtataaggaagattataatatgttttgtagtaaaggtgtcatgtatttaagaatgtggtctaatcgtaattccatcaaataagtctttccaaaatgcttcattgtattggtatacatccataataggacatttcataacgcaaacacgttgtaatccccaatcttcttgggtgatagttggtatatcggcaggaattagtaacaggacagagaatgtatgtgtaacgatttgagataaaatttgttctagggaacatgcttcttcatatgttcctccagttcgaataaataatatggattcggccgtttcaattgtagctagaaaacgattaatacgatgttcataatttaacttaatttctgtataagaaggccaagaagttggtgtgtttacatctgttttaaagtcatgacaggagtcaatttcataaaggttgtcccttaatcttaattttgcatcatcatcccaaaatgagatgaaggataaattttcgaaatttaaaaagcggtcaaatcgattttgtaataatacattcactttttctaatgaggggcttagcataaaatcaataacgccaaaaaatggtgataattctaattgatataatgcccaagcaggccagcagttttgtcctaagctgaataccgcattatattctttttttatatcggatagattcatgtgatttatctcatcctttttgttaatattttatgccattcaaaaatggtatgtgaataaagatagacaagcatatttgcaaagaataagcagaaatatgttacaatagaaaaaaatcgaacgaggtggttgttacgatgcgatcgaagcgagaacaagccattttagacaatataaaagaatgggaagcgcaattagttgagcaagaagcgaccgattttcaaaaagtgtttgataaatggttacatactacagttgcgaaattacctgagaaaaagcgaaaagaattcttcacgaaagcagatggatggctctttcatttgcatgcatttattcaaagttcacaagcacagttagatgcacgtaatcggattttaggaacatcaagattatttgatgaatcgattgaacagcttgaagatttgaaagcattatctattgatcaattaacatacatagcagagcagcaaacagcacgtcatcgtctatattcatttgtacaaggcggggcaacaggtgctggaggtttattattattaacggcggattttccggttatgatcgcattaaatgtgaaggcagtccaacttattgcaacatcatttggacatgatgtgaacaagccgtatgaaatgatgcttgcgttaaaggtgtttcatgcgtcattactaccaggaagacttcagcaatacgcatggtacaatttattgcaagagctggagcaagaagattcgttcttctacgaaggagacgaagcagtgctacaaacagcttctactgaggttgtgttaaaacaaattttgaagacattttcgatttatgctcttcgtcgtaaattattccaaggtataccggtaattggaatggcaattggatctacagtgaattatcgtttaacaagaaacgttactgaatttgcaaatagattttatcaagtgcgccatatagtcgagaaagaaaaaagagcataaaaaaagcgagaggccgaagcctttcgcttttttaatttgttgcatgttttttagacattggaacagatactggctgcttttctgctgttttttctgtttttggataataaattaaatccaatgtttttgcctgtacggcaatcgaaagaatagtaaaagcaatttctgtccaatttaaataatataatgaaagcgcaagaacaatcgcgtcaaagacgaagaaaatttgcccaattgtaaaacgagttcgtttacttaatacaattgttaaaatatcgtctccaccggttgcaccgccaaatcgcaatataaaaccgagtccaataccagctaacgcaccgccaactactgcagctataaataagttatttgataaatctaccgtaaatggagaataattttccataaaggaataaaatactccgaatgaaattgaacctaggaatgaatagccaaccatttttctacctaaaaatgaagcacacagtaaaataattgggatatccattaatacagttgaaatagatggtgaaatatcataaaagttttgaatgaatagtgcaattcctacaaagccaccttctgttaagtggttttggaagtgaatgtgatatagcgctgctgctaaaataaatgaaccgattaaaaccataaaaatttctttaataatttgccgactttggatgttcctcatcgttattccttctttccgtagttagtagtcctttttgtgttgtaaactaactacgagctcacatgtagctttcagttagtttacgaaaaaactaactacgctatatgtcgctgaagaaataacgaataatcctctcgtccatcaattctccctaccttcgttttagtttaagtcttaaaacgactaaacaaaacgtggagtaggattcttcatttagcaatcctgctcttctttgttttgtttagttagtaacaattaagtcctaaacaaaacgctatgtgtaagaagagtcttttttttgccaaattatccttcgggcaatcataatttccccactctcgtatttttttcgctagactaaagtatctgagctgaaaaatacgctacgtgtatgattcgtcaatacgatgccacatgctccttcgagcgatcatgatatcaaaatcccttccttcaagatttatactattatatcatacttttaaaaaatgtatgcggatggaaaccgacaataaacggagggaatctacaaaaaatgttatgtttaaatatttttgtagaaaagcctaagttatttcggaggattggacagtttgtaacggtttgtccaataagtaagaaaaaaaggttttattccgttgtattcttttcatcacttttatctttgaaaaacgcatcccaactaatcacacttaaaaaagttaaagcgataataacgaaagcacgcataagctgtagacctccttttgtacatagtatatgaatcattcgattcggaatgtgtcatttttttacaagtcttaactattatgagagtatattaatatagatagatgaaggggagagtgaaggtatgctaaaagaaatgttcaaaagaaaagaattaatatgtatttcatgtcagaaaaaaattcaatatgaagaagagcttgttgcttttgtaaagttgccgaaagaaagaagtatattagttggcccttttgatgtgtgtttggcaaaaacagcacaagagatatattgtaaatcatgttacgacaaaaaaagcatgacccaaagtaattgagggacatgcttttttcattggtgtgctttccccatgcccatcaacttaaggatagaaactctacggttttccattaattgaaatggaaaatgtacatatttattcaagcgttaatgtacatatttaagttagcatttatagtaggccattattttgctttttcgttatatcatatagtataatattcaaaatcagcaaggattttttcctgaatttttgctgatgaagatggaaaaatttttcggctttataggttgataaagttatgtcgtaacaggaaatataagaacagatatataaataaataaaaagaacataaaaacgcaaataaaaacgaaaatgaggggaactttatgagccaaaatcaattcgaatgtcgtatttcagaagaagatgtacaaatgttaagagcgttagctcacccacttcgtctacgtctagtaatggaacttatgcaaagaggaacatgtaatgtaacacagctacaggaagtattagaaattccacaatcaactgtttcacaacatttaacgaagttaaagcaaaataaagtagtacgctttgaaagacgaggattagaagtgtattatcaaatccataatgataaagtaagtgcggtagtaaaaacattattttcttaaaatttgaatattatggaaaaagacgtgtagaatatacgtctttttttatttgtcagaaaggtagcgagagagtaaatattagcatgttaggaagaaatgactatcaatcaacatgctgccttacggaatatattctaaaaggaaaagaaaaaatagaaaggagtgtagtaagcaaaaggagggatagtagtatggatgtgaaacgtgtgaaacaaatcttatcttcttcaagtagaattgacgttacatatgagggcgtaccagtatggattgagagctgtgatgagcagaaggggagtgctcaagtgtatgatgtatctaatcctggtgagagcgttcatgtggacgtgacagctttagaggagaagtaataaaaaagacgcttctaattttagaagcgtctttttgttattccatcatatgtgcaattttcttagagaacataagaagtactaatcccagtacaattacgataataccgatgcttgcgaatacttctaaatatcctaaagattgagtgaaagcggctaattgtcctgctaataagtttgcgaagccagtaccagctaaccatacacccattaataatgatgctaatttaacaggagcgattgcacttaccatagataatccgattggtgataagaataactcaccgattgtgtggaacatgtaagtgaatacaatgaatagtaagtttgctttcattgtaatgttactttcatcgctaccagtttttaaaacagctaaagttagaactaaatatccaatccctagtaaaatcatacctaatgccatttttgttgggattttcaaatcgccattttttgtttttgaaagtttaatccataacgcagaaacaggtaatgctagtaagataatgaatagtgggtttacagattggaaccaaggtgttggaattgtaaatccaccaattgtacgatctacgaacttatctgtgtaaagtgttaaagaactaccagcttgctcaaatcctgcccagaagaatacaacgaaacaagttaaaattaaaattgcagcagtacgttttttctcttgtgttgttaaaggttttttctcaattgcttttgcatttttttctttagatttttttcctacaacagttgttccgatagaccctaagtaacgaggtgctaagaaattaaaggcaagctgcccaataatcataccgatacaagctgttaagaaaccgtatctataatctgcgaagtaaccgcaaatgaatggagcgataagagctcctaagttaatccccatgtagaagatagtgaaggcactatcacgacgagaatcgttttcgctatataattgacctaataaagtcgaaatatttggtttgaagaatccgttaccaataactaataatcctaatcctaagaaaagtccagtttttgtgttcattgagaataatacaaagttaccaattgccatgatgataccaccaatagtaatggcatgtcgcttcgtaatgaaatggtcagttaaccaaccaccaataataggtgtgaagtatactaacattgtgaaaataccgtaaatttgaactgcaactgctttatcaaatcctaaaccgccgcttactaagctcgttgttaaataaagaactaataagccacgcattccgtaataactaaatctttcccatgcctctgtaaagaacaacaagtataaccctggtggatgtttttttggtgattgttgctctccagctttgtctaattttaaagctgcatccatttttgtttccccctaatcctgtataacggatatttatgtaatcattttaatttacaaaatatttagaagtcaatagaattatatggaaatagaaagaaaatttctaaaaaagttctatttttcttcgaccgttactgtattttgccctgaaaacgagatgataagcgttttcaaatgtaataattgaattctaaaagaaaataaaatagtgattaatcagaaaatttagattaaaacatttattctgatataaagaaaaaatattctatttactttctcaatataacatattgggaataaaaatacaaaacgaaataatgtgacatttaagtgaattgaaaaataaccagctccacagaagggagctggttaaggaaatattatttaacaaagcgtttttcgatgtcatctaatagtaggttagcggccattacgccaccagctgtattccaaataacgtcatcaactttgtatgctttaccattttttactgcatttaaatttttaaatagaggatcgtttatatactctttttctagttcagatccttttttctcatttcctttatcgaatgtgaagtagaataatacgtcaccatccatagcagaaatacgctctttagatacgttacgctctgcaaaatcatctttattttgatctccaggacgtttaaatccaagttcttttaaaataacaccagagaatgtatcgccatgataaatacgaacatcaccaggcatgaaacgaaccatagagatttcttggtttactttatcaccaagtttgccttttaaatcttttatacgtgattcgtaatcagctacaactttttgaccttctttttctttatttaatgcttttgcataaaatttgaagttatctttccattcaccacgtaatgtatctgagaacacagtaggtgcaattgcttttagttgttcgtacactttttcgtggcgcattttattaccgataattaagtctggttttaaagaagcaattgtttcaacgttaacttgtccttcatcaccaacaacttttacatctttcattttatccttaatatgtggataccatgggtcaccagtccaagactttacagcaccaactggtttcacacctaattcaagtaaagcttcagttccttcatttgttaagataactacacgttttggattagcaggaacttctgttttacccattgcatgttcaaccgtaatcatttctttttttgtatcttctttcgtatttgattttccacaagcacttaaaagtagtgaaaaggctaataaaaatacaaatactgtaaacgaattttttcgcatgaaattcattatgtaccccctacatagtgagaatttttttcaatagcaagcatgatgttaagtctttatctttttattgtcaatacatatggatgaaaataattctcatttccgttgacaatgagaattaagttgaaatacactaacaacgtatcattatacattgaaggggaaacgctgcatgttattaaaaacaaatcgagcaaaatggattggattatttgttggaatcattgcagtcgttatttgtatttggggaagtattatttttggatatacaaatacgagttggaaactagcattggatgcttttttccattttaacggttccaatgaacatattattattcaaaacgtacgtctgcctagggcgttaattgcagctagtgttggtgctagtttagccattgctggttgtcttatgcaaactttaactaagaatccacttgcttctccagattttattggattaaattcaggtgctgcgttcttcatagttgtagcaattgtaatcttttcagtaacatcattatcagctttcacatggattgcctttttaggagcggcggttgcagctgtacttgtatttgcttctagttctttaggaaaagaaggaactactcctcttaagttaacgttagcaggggtcgcaattagtgcgttattttcatcattaacacaaggattacttgtgttaaatgaaaaagcacttgaagaggtattattttggcttgctggatctgtgcaagggagaaagttagaaattttacaatctgtattcccatatttattaataggatggattgcatctcttatgatggcagggaaagtaaatacattgatgatgggagaagacgtcgcgaaaggacttggacaacgaacaattttaatgaaatcattcgtgttacttattattgtactgttgtctggtggttcggttgcggttgctggcccaattggatttattggaattattaccccgcattttgccagatttctagttggagtagatcataggtggagagtaccgtatagcggtttattaggtgcaatactattaatcttagctgatatagcagcaagatatgtcattatgccacaagaagtaccagtaggagttatgacagcatttattggagctccattctttatttatattgcacgtaagagagggcttagcaaatgaaaaaatatattccgtttcgtatagggaaaggcgggccctcgtttttaatgtataaacgagcttgtctcgtcttatttagtttattagttgttttaataggattattttttgcgagtgcaggtatgggagacatgaaaattgctccttatgatgtatggcaagcgatcactggaaatggcgatgcgatgtctaacatggttgtaaataagtttcgtatgccgcgtattttaattgccatcctcgtaggaattgcgcttgctgtagcaggatgtattttacaaggtctcgttcgaaatccacttgcttctccggatatcatcgggattacgggcggggcaagtgttgcagttgtattgtttttagctatatttagtgataaaaataatgcgctaactgtaagcattcattatatgccgttagcagcctttgttggggcaacgattgtggcgctttttgtatatttatttgcatggagaaatgacgggttatcgccgattagtcttgttttaattggtgtggggttttgggcattaacgaaagcggcaacgactttgtttatgttgttagcaccaatttatcaagcgagtcaagcgaatgtatggattacaggtactgtttatggttcttcatggcaaaacgttatggtgcttgcaccgtgggttctcattttaacggtaatatcatttatagctgctagacatttaaatgcgcaagagctaggggatgatattgcggtaggacttggtgttcctttaacgaagtcacgcgtattcatgttattacttagtacggctttaattgggggagcagttgccttcgccggaggaattggatttgtcggtttaatggcacctcatatttcacgaaggctagttggttctttatacggtgcattactcccagttgcagctattgttggtgcaattctagtacttgctgcagatttaattgggcgtacagttttcacaccacttgaaattccagcaggggtatttacatcagcaattggtgcaccttattttatttatttactttataaaagtcggaattcataaagggagatgaatatgcaaaaagcattggagacgaaacgtttgacgttgtcttatggtgaaacaattattattgatgagttgaatttagaaattccaaaaggtgaaattacaatctttatcggttccaacggttgcgggaaatcaactttattacgttcactagctagattattaaagccaacaactggtgacattttgttagataatcaagctattcaaagtatgcaaactaagcaaattgctcgtcaaatggcaattttaccgcaaggaccgcaagcacctgaagggcttacagtattgcaacttgtaaaacaaggacgctatccatatcaaacatggctgaaacagtggtcagaaaaagatgaggaaatggtacagaaggcacttgcagcaacaggtatgacagaatttgctgagcgtgatgtgcatgctctttcaggtggacaacgacaacgtgcttggattgcaatgacgcttgcacaagatacagatattattttactggatgagcctactacatatttagatatgactcaccaaattgaggtgctagatttattattcgaattaaatgaaacagaacaaagaacaattgtcatggtattacacgatttaaatttagcatgtcgctatgcagataacattgtagccattcaagataaacaaatatatgcacaaggtaaacctgaagaagtggtagatgagaaactagtacgtgatgtattccgaatggagtgtcaaattagtacggatccgttgtttggaacaccgctttgtatacctcacggaagaggaagacgtgtagttaaagaagttgctcaggcaatgagataaaaaaacgatgagtgattcatcgtttttttatttggtacaagaaaataagaggaagagaggaatacgtaagcgacgtttatactcttcttcattttgaaaataggttggatttggtgtagcttcttttaatgatgtaatggtaaatccggcttgctgtaataatgtgaaataatcttccgttgtacgatgatatttaataacttcttggtcaatccatggttcaacccgtttgcctagtttaaagtaatcatcgacgagccaactcattcttttaccacttgtttgtaagctttcaaacgaagaagtaataacaggatgttgaacgctaaaggtaaaggtgccatttgtttttaaagtttgaaacacattttgaaaaatgctatcaagatgttcaatataatgtaaggcgagtctagatgttactaaatcaaaagtggaagaggggtaggtataatctttgaggtttaaaaaatgaacagttccatttttattttctagttgttttttagctttttcatacataagttcggagccttcaatgccggtgtaagagtagcatcccttttctaataattccgcgccaaacttagcatcaccacagcctaaatcgagaatttgttttcctcgtacatgaccaatgagctgaaagaatattggtttttcaatggattcatttgggctattttctcggtatcttcgtttcatatattgttcgaaaaatgctgtgttattgtatacatcagattctgtaaatgccatgtttgaaacctcctgaaatatttttttaattctatcaaatatgaaaagtaaataatagatttattgtaatgaatcatatataatctaaaattgtaagcggttactttaaactatttttctataataaattctgaaaacgtgttaagctagtagagggattattagaactattaagacaataatccgcttacatgaacgatgggaggcttcacgatgtctagtaaaacacttgcgaaatttttagaagaaaatttagaggatttaaaatcaaaggggctttataacgtaattgatccgcttgagagttcaaatggaccgatcattacaattggcggaaaagaatatattaacttatcttcaaacaactatcttggattagcaacagatagccgtttgcaagaagcagcaattggtgctattcataagtacggtgttggagcaggggctgttcgtacaattaacggtactttagatttgcatattaagttagaagaaacaattgcaaagtttaaacatacagaagcagcaattgcttatcaatcaggatttaactgtaatatggcagcgatttcagctgttatggataaaaatgatgcaattctttcagacgaattaaaccatgcttctattattgatggtagtcgtctatcaaaagcaaaaattattgtttataaacattcggatatggaagatttacgccaaaaagcaattgcggcgaaagaatcaggtctttacaataaattaatggtaattacagacggtgtcttttcaatggatggagatgttgcaaaactaccagaaattgttgagattgcagaagagttagatttaatgacatacgtagatgatgcacacggttcaggtgtacttggaaaaggtgcaggaactgtaaagcacttcggtctttctgataaagttgatttccaaattggtacattatcaaaagcaattggggtaattggtggatatgtagcagggaaacaaaacttaattgactggttaaaagttcgttcacgtccattcttattctctacagcattaacaccagctgatgcagcagcttgcatgagatcaattgaaatcttaatggaaagcacagagttacacgatcgcttatgggaaaatggccgctacttgaaacaaggattaaaagaacttggctttaacattggagaaagtgaaacgccaattacaccttgtatcattggggacgaagtattaacacaagaatttagtaaacgtctaaatgaagaaggggtatacgcaaaatctatcgtgttcccaactgtagcaaaaggaacagggcgcgttcgtaatatgcctacagcagctcatacgaaagaaatgttagatgaagcaattcttaagtatgaaaaagtaggaaaagaaatgggcatcatttaagtaacgacatcttttgaatagcttgcaaatgaggagtggggaaaatgaaaaaaattctagtaaccggttctttagggcaaattggttctgaactagtaatgaaacttcgtgatgtatacggcgcatcaaatgttattgcaacagatattcgtgaaacagatagtgaagtagtaacgtctggtccatttgaaacgttagatgtaacagatggacaaaaactacatgatatcgcaaagcgtaatgaagtagatacaattattcatttagcagctttactttcagcaacagcagaaaaaaatccgttattcgcatggaacttaaatatgggcggacttgtaaatgcattagaagcagctcgtgaattaaactgtaaattcttcacgccaagttctatcggtgcattcggtccatcgacgccaaaagataatacaccgcaagatacaattcagcgtcctactacgatgtatggggtaaacaaagtggcaggagaattactgtgtgattattatcatcaaaaatttggcgtagatacgcgcggtgtccgtttcccaggtttaatttcttacgtagctcctccaggaggcggaacgactgattatgcagttgaaatttattatgaggcaattaaaaaaggtgcatacacctcatacattgctgaaggaacgtacatggacatgatgtatatgcctgatgctttacaagcgatcatttcattaatggaagctgatccaagtaagctagtgcatagaaatgcatttaacattacagcaatgagcttcgagccagagcaaattgcagcgtcaattcgtaaacacattccgacgtttacaatggattatgcagtagatccagctcgtcaaacaatcgctgatagctggccaaactctattgacgcaactgcagcaatgaaagagtggggctttaaagcagaatacgatttagacaaaatgacaactgacatgctggctaagttaaaaaaaaagctcacagctgagttagtgatgaattaataggaagagtcgattcttaggaatcggctcttcattatttttgggaggagagaagtcttatgcaaagagttgatgtcgtatacgcactaatacatgacgaagaaacagataaaatattaatggtacataatgtagaacaaaacgtttggtcattgccaggtggggctgtggaaaaaggtgaaatattagaggaagcactaataagagaagtgaaagaagagacaggtttaaccgccttggctggggggcttgttgcgatcaatgaaaaattctttgaagaatcagggaatcatgcactattttttacattccgagcgaatgtagtaaaaggggaacttattgcggaagatgaaggtgaaatttctgcaatagagtgggtagatcgaacaattgcgaatgagcgtttcccatactatgacggaggatttgaatctttattagaagtagccattccatacaagtttcaaccagaaacaaagtaattgaacgaaaaaacaggagccataaggctcctattttctattcaatcgtcttcagtaatagttttttcagcaatggtttaatcttcaatcgtaaatcttcagcatgatttgcaactaagaagtgatggttataaatgtttttcatcaattgataagttgcttctttcgcttcgccttcttcgatgaagataccgattacttccataccacttttacgcgcgagtttaacagcttcatgcgtatctaaaattccgtcttgttgatagtctagcgcagaaggctcaccgtctgtgaagactagtaagaatttatgtttctcaggtcttttggcaagtttttcagaaacgatacgaataatatatccgtcgcggttatcttcttcttcacgaagttgcataatttctggaccaacgtttggcaacgttgagtttttataatttacaacttcatggataacgttcggcttatcttcaggtttagcgctagaggcatcttcccaaaatccgctaatagcgtgcgggatttttaaagactttaaagcttcatgaaatagtacaacactcttcttcgtttcttccattttgttatacatagaaccagaacagtcaactaatagttggaatgcaacatcgagttcttgtgactcttgtccttttttataaaacatacgcggttgtttttcggtataaatacgaaggaatttcttacgaagtcttccgtaatatttatcactattcgcattcgttttattttcaattgttttttcgataattttctttaattcttttacatctttattgacgactgatttgatagcttggtaatcttttttctcatctgagtttggtttgcgagcttctttaaatgtatgagaagcacctacattatacttaccgtatgcaccgtcgtgctggctagaagcgtgtgaagcccttgcttcttctgtatcagcgccatcaaagttggattgtgtacttttttgtgaggtaccttgtacagaaccaagtgcttggtcgccatcttctgattcacgggcagtatcacccatcatattagtttttgttccgctttctaattcaaagcgtaaaaagttctcgttttcgttatttttattttcacgatgccatgtggagaaactttcatccattttgtttttattttcatcgtcatctataagctgcgtatcatcatttgctaaatcttcgacgcgacagttcttttcgtctgcaaggacagataagtaaagtggagcatgtccgaaatagttgttaagcatatcgctttcaagaagcgcctctaagcgatagcgaattttctcaacgatatacataatatcttcagtattacgtgcttggaatgtttcatgtaaaatcgcttcaatttgctcaaaatattcattattaaacatttcgtatttatcgctagttaatgaaagatagcataggcaaaatagacgatcaccgtgataattacgaacacggtttatttcattttgagagccgaaataattgcggtacatttcttttcgacgtttaaaaacatgcttcgtgccaggacgtaagttctttacgatttcctcaacgcgtaaatcttctaatagaacaaataattgtgttaaaaacttttttaggggcgattcttgcaattcaatcgcataagagcgaattaaagtcatgtccgagtaatgtttattaccaagtgcttttaagaacacttcgctttttaatccgattactgtatcttcttcttttcgatcatcccaaaagtgactaatgacaactttcttttcaatttcgtcgtagtatgctttatagccatattcaagataggcatcgtcttcttttagaagggcatacattaagttttccatttgtagaaacagcgacgcatcaatttttttgtcactaaaaatttgtctcataaattatccctcaaagaaataactttctgctaattcacggacagtcatttgttctgtttcatcattaagttttgcaattatgcttcgttcaatcgctcgcataacaggaatatatacacctaaatcacatgcgtcgataataccacgaatacttgctgcttcttcacttacacgtccatcgcgagctaaaggcataaggtcgcttgcaaatgcaacaaacttttcaattgttgcaacatcatttaattttgattctgctaataatagttcttttaatgtatcaccttgaatgtaaggaacttcaataataacgaaacggttttttaacgcttcatttagttcacttgttccaacgtaaccttcgttaatcgcagcaattacacggtattcgtcatcaccgtatacaacctcttgtgtaaatgggtttgtaatcattttacggtaatctaatgcgccgtgaagaagtggtaacgtttcaggttttgccatattgatttcgtcaatatataggaagtgaccgttcttcattgctttcataagaggaccgttaacgaatgaaacttcagatgcaccatctttcgtttgtagtgtgttgtatcctaaaataccctctacatctaagtcgacagagcagttaatgctatgcattggtttttggaataaagaagaaagagtttccgctagtactgttttaccactaccagtcggtccttttaatagaatattcttgccaagaagaagtgctgtaatcgcatcttcaataatgctattatcagacgctttatatattttcgttccgattaaatgtgcattttcaccagcttcttgtttattcttttcatgaatcgtagaaagctgttgttttaaatcagcatgtatatgaaattgttctaacatgtatttcccacctaacattattttcataaagtaatacatcttatgataacttgttttaatatggtatgcaaagaaaaggaaggaggataaagggaaaagaaaaagcaatcaagatgaagttgattgcctacagtaaaggagaaatgagcctcatgaaagactccaatatgcgtttttttatacttcttttttggaaagagttccatttaatttcagttgaatgtttaaaatcttcttcaaaatcacgtttaatgtcgtgaactgtttttgattcataaagaacgctaataatttcgtaattcaattcaaagctacgtacatccatgttcgctgttccaatagttgcaattgtatcatcaacgagtacaatttttgcatgcataaaaccatctttataactgtaaatagaagcaccagcttttaaaagcggagtgaaataggattgagatgcttgatcactaatgatgctatcacttttacctggatataaaatccgtacatctattccggcaattgcacttaagcgtaataatgttaaagtttcttgatctggaataaagtagggtgtagcgatccaaatggatttttttgcagagcccataacagctaataatgtattacgaatacttttatcatcggagcttggtccgcttgctacgatttgaacagcaccttctgcatttgaaatctctttacctgggaagtattgtctattcatgaattgatcccaggaataagtatttaaaccactagaggcatagagccagtcttctagaaagattgcttgtaatttatataatgcttttccttctatttttaaatgactatcacgccaaacaggaaatttcttggaacggccaagatattcatcaccgacattgagtcctccggtaaaaccaatttttccatctacaataacaatttttcgatggttacgataattgacagtttcaagtaaccaagctgaaaaaatagggtcaaattctacaatttcaatcccagcttctttcataggttgcaaaaatcgtcgtcgtaacgtattacttccaaggccatcataaaggaagcgtacaataacaccatcttttgctttttgtattaaagcatctcgaacttttgtaccaatttcatcagatttataaatgtagtattgaatatgtatatgatgctttgcctgctctatagctcgcaaaatctctgaaaatgtttgatctccgtttgttaaaagttttgtagttgttttatctgcggcaggaccacctccaaatttttgtatgacttctgttaaatgtatggaacgttcatttagtgggactgtgagtaataactctagtcttcttccttctaatatttcacggaataattttctttgttcttctgaacgatggagatgtttttttcttctccagcggctgcgtccgaaaatagcgtataaaagcacacctataataggaagaagtgctaatactaaaaaccatgctaacgtactttgtggagatctattttctataaaaataacgaatgaaattccgacaattgtgatggaccatagagcaccgacaaatgtatataacgaaatatacgatgtatttaataggaacagaacgatagatacaattgtaaatattaatagtaattgaacgataggcttcttcatttctatataattcccctaatcttttttcaatatagacttcttaaatagaagatgtaatatgacatctttattataaggtgttttgctttttttacaaaatatagacatttcacctatactttccgcatttgtcctacatacagtgtactatcccattttttatcccactcttaacgcatatgaaaatgaaaaaatcgaaaaggagcggagaaacatgaattatatagaaaataatggattgtactatcgaaatcatcatcatggtggacatcatcaccatggaggacacaatcactatgatcaccatcatcatcacggaggcggatggggctggggtggtggtagttcatggggaggcggatttttccctggaagctttgcaggaggagtgttaggcggactgacagctggtgcattaacaggtgcaacaagtggaggatattatccggctccatatccagtagcttatccatcaccataccctgtaacgtatccaatgccatacccaggttatcagcaaataccatattcgtattaaactaaaaaagaggctatcctcttttttagtttaatacagtatttatttataaaataattccaaagttaaggtggaaatatgttaatattttgttattgtaattcaaaaacatgcacattaatgtagattttcatattattatttgtgaatagttatgtagtatgatctaatttctatttcgttattaaaaacaaagagatcagatatgagtggtattagttggaaacaaggcttgcatagagctacttaaaaggattgcggtataataaggcgcgaagtaattagagatatgggaagctaccagttataattgaaacggtataatattgctttttattacaaataatattatgttattttaatcggtttatttaaaaagataatttatgtaaagggctagtattagaaaatgaaatatctctatttctatgaagagaaacaggttgtgttttagtcagatagaagcaaggagagatgcgcatgctagaacagagaggtcatgcattatatgactcttcgttgcgagatttaaagttagcattagatgagtcttcaattgttgcaattacagatcgaaaaggtcttattacatatgtaaatgataaattttgtgaaatctctaaatacaaaagagaagaattaattggaaaagatcaccgtattttaaattcaggtcatcatccgaaaaccttttttcaaaacttatggaaacgtattttgaatgggaaagtatggacaggtgagattcggaatcgagcaaaagatggtacatattattgggtcaaaacaacaattgttccatttttaaatgaaaaaggagagccttaccagtttatcgcaatacgaaatgatattagtagtagaaaagaagcggaacagaggttgcggctaagtgaaagtcgttatagggaacttgcctatcatgatgctttaacgagtttgccgaaccgtttgcaattaataacgaccgttaataaattgattgcagataaaaaagaatttggtatgatttactttgatttggaccgttttaaattagtaaatgatacgttaggtcatatgataggggacttacttttaagcgaagtcgcttcaaggttgcattatgtactaggagagaaagatgttctggctaggctaggtggcgacgaatttgtgctgttaacaaaaaatcatagacaagatgatatgaggcagttagcgacatctgtgttgtcatgtttccaggcaccatttattcttgaaggccatgaagtatatatttcagctagtctaggactttgttcttatccacaagacggacaagacgtggaaacattattgaaaaactccgacttagctatgtatagtgcaaaagaacaggggagaaatgctgcatgtttctttacagatgagctacgcgcgaaaataaatcgtagaatgaaagttgagtttgctttgcaaaaggcaattcgtgatgaagagttagatgtagtattgcagcctattattgatttgaaaacgaagagatattctggtatagaagctctagtacgctgtatgacagaagacggacctatttcaccaaacgaatttatcccggtagctgaagagtctggacttattataaagctaggagactgggtattagaaaaatcgtgccgattgtttaaaacattgcccaattatcaagaaggactaaagttatcagtgaatttatctatacaacaattaatgcagaaacgttttattttctctgtacgtagcattttaaagagaactggttttcctccgaaccgtttaatattagaaataacggaaagcatagcagtccgccattttgattatattattgctacattacaagaattaagaaatatgggtgttttaattgctttggatgatttcggaactggctattcttccttatattatttaaaacaactaccactggatattgtaaaaattgatcgtaattttattcgtgaatttcattatgatcacgcacaaccagaacgaacgattgtaaaatccgttattgaaattgctcatagtttaaatttagcagtagttgctgaaggagtagaaacagtagagcaagagagtttgttacaatcaatgagctgtgattatgtacagggattttattatgcgaaacctttatctgtaggagagctaaaagaaaagttaattacagatttttaataaaaaagagaagccagcagcttctctttatttaatccgttttttgtgagtctttcattagtattggataaagaataagacctaatacgaacaatccaattcctaagaagaatgtttttaaatcagcagttcccgttttgataacccaaatagagtataccaacgctaatgtcgtaatgattccatcttttactcgagatccgggcagtatatcatacgtttctcctgtaataactaattttaattggtacaaggtagaaacaaggtatggaattaaataggctaatgttgctacgacgatagcgaaactatacgcttctgaaacagtaccagaaatcgttgaaaataagaaaatttgcgtcattatatttgtaatcaatagtgattttgaaggactaccttttttatttgttttcccgaaaaacttagggaaaagtccattttttgctgcctggtaaggtacttctgaactaacaacaatccagccaactgtagatccaaataaagatataagagcgagtaaagccattatatatgcacctttatttccaattgctaaatttaatgcgtctactaatggtttttgagactcttttaaagcatcttgcggaagagctcccattgtaagtaaagtaattgacatgtaaataagaagagcgataattaatccgaaaatcgtagctttttttacatcgcgctgtgattttgcacgattagaaagcataactgctgattcaataccgataaatgcccagagtgttgcaatagcagctgaattgatttggccacctaatgagattgattgtcctgcttcattcataaaggtttgaccgtctccgaaattagaggcgttgaaaatgaacaatgtaattacaataaacattgtaaatccaataatttttgcaatagtagcaagtagattcatatttccagctcgatcaatattttgcgaaagaatatattgaattccccacagcataaggctacatacgaggaaagttaatccttttccgagctccagtgaaaatccatttattgaaaaaagaatttgcttactttgtaaaactggaaagaatgttgataaatatccagcaaaggaaataataacagatgctgttgcagcccagttagcagcccaatatccccatgccatactatatcctgcaactttaccagctttttttgaaggaaacatcgcttgagcatagctttgtggtccagcttttaattctggtttccgaatcgctaaatttccaaatacaagtgcaatcataaatacgccaaggcctgtaatactccatgcgagtgtagaacccattggacctgatacttgtgctaaatttgctggaagcataaatacgccaccgccaaccatattcccgataacaaatgctgttaaaacccataatccccactttttcgtttccatttttgttaactcctttgtagtaagttttgcttaaacatcattttttactagctttttgacaataaaaaaagagccatgtagataaaaaaatacctacatggctcttttgccaaagcgtaggtacaacgggaataacccttgtacctacgcgtaatttttccgctaggtttcaagggttacgtatgatgatgatgtttttgtgcaaatgtaactacagttgttgtataagtaagcatagttctttgctccctttctcctctgattttgaagttagtatactacatgtttttttgaatgaaaagaaaaatataaaaatttttataaaaatacgttttaaagattaaatatttacctatatttttcttgtactggaaaataagtgagagattggcagaagagtgaagcatgttataatacatatagaattagaaggtgacaaggggctagtgtagatgatgagtaagtatgaacaaatttatacagaaatcagtaaatctattgataataaacaattaaaagagggatgcaaaatcccatcagaaacagaattaatgaagcagtatgaggcaagccgaggaacggtaagaaaagctgtagatttactgcaagagcgtggatatgtgcaaaaaattcatggaaaaggtgtttttgttttaaagcgaaaaaatattgaatttaattttggcggtattgtaagtttccaagaagaaaatgaacgtttaggacgtcattgtattacagaagttgtggaaatggacaaagaaaaagccacaaaagaaattgcaaaattattaaatgtaaaagaaaaaacagagattgaccatattaaacgtgtacgaaatattgatggagaaaaagtaattttagatataaatcattttgtatctgagtttgttccaggattaacgaaagaaattgcaactgcatcgatttataaatacatcgagaaagagcttgggctacatattagttattcgcagagagtaattgaagtacagccatgtacagaggacgatagaaagtacttagatttaaatggaacagactatgttgtcgttgtgaaaaactttacacatttgtatgatggaagtcagtttgaatatacagaatcacgccatcgtttagatatttttcacttttcggatgtggcacgcaggaagtaaagaggtggaacaaaatattgtttcatctcttttttttataaaaaaaaaacataaactcgtatatacgagtgttgactaacttatatatacgagttaatatgtaattgtaaacggtatcaaaaaaagaaaagagggacgggaatatggggaaagactatcgtaaaacagcagaggaagtgttgcagtatattggtgggaaagacaatattgaacaagctgcacattgtgtgacgaggctccgtatcgctttaaaagatgaaagcaaaatagataatgataaattacagtctgtttcattagtgaaaggagcgtttcataacgctgggatatttcaaattgtaattggtccaggggatgtagatcgtgtttacgctgagttgataacgcttgcaggtatgaaagaatcgactgtagctgacgtaaaagactctggaaatcagaagttaaatccagctcaaaagtttgtgaaaatattttcggatgtatttatgccgatattaccagcgatcgtaacagctggtttactaatgggtattaacaatctattaggcgcaaaggacttattttttgatggaaaaaatttattagatgtttatccgaacttaggcgggctttgggatttaattaatatgatggccaatacagcattcgtattcttaccagcacttgtcggttggtcagcaacgaagcgttttggtggtagtccaatactagggattgttatgggattaatgcttgtgcacccggccttattaaacgcttgggactatggaaaagcagcgactggtttagagggtcaaaagattgagtacttcaatattttaggactgttccaaattgagaaggtaggatatcaaggacaaattttacctgttttagtagcagcatttgtattaagtaaagtggaaattttcttaaagaaacatgtaccaaatgcaattcaattactagttgtaccaattacaacaatcgttgtgacaggtgtgttagcgttaggaattatcggtccggttacacgtcatattggagatttattaacagtaggattagtaggtgtatatgaaacagtaccagtagttggagcagtattatttggagcgttatatgcaccgctcgtaattacaggtatgcatcatatgtttattgcaattgatttacaattgattgcacaacatggcggtacatttatttggccgatgattgctctttctaacattgcgcaaggtagtgcggcacttgcgatgttctggatttctaaaaatcaaaatgataaaagtatggcatcaacatcagccatttcagcatacttcggtattacagaaccagcgatgtttggtgtgaatttacgaaataagttcccgttttatgcagcgattatagggtctgctgtggcagcgatattcattacattaaatggtgtattagcacctgctatcggaattgggggattgccagcatttatttctatcattccgaaatcgattccaatgtttattgtcggaatgattattgcagttgtaatcccatttactttaacatggttatttgcaaaaagagtgaaacagaagtaggaggaagttaaacatgaaggattggcataaaagtgtagtatatcaaatttatccgaagagctttaatagttattacaatagagaaaccggtgatataaaaggggttacagagaaactagattatttaaaagaactcggagtggattatatttggttaacaccgatataccaatcaccacaaaatgataatggatatgatgtaagtgattattacagcattgatccatcttacggaacgatggaagagtttgaagaacttttagcagaagcgaaagtacgtaacattgaaattatgcttgatattgttgtaaatcatagttcgactgaacataagtggtttaaagaagcgaaggaagataaaaatagtccatatcgtaattactatatttggcgtgatgaaaaaaataattggcagtctaagtttggtggatctgcttggaaatatgatgagaagacggagcaatattatttacatctatttgatgaaacacaagctgatttaaattgggaaaatgaaaaactgcgtgaagaagtatatgatatgatgcgcttttggctggataaaggggtaacgggattccgattagatgtcattaacttaatttcaaaagaccaatgttttttaaacgatgaaggtagtactgcgacaagtgatggacgcaagtattatacagatggcccgcgtgttcatgaatatttacaagagatgaaccgaaatgtttttgcaggaaaagatgtcattacagttggagaaatgtcatctacgacaattgataattgtattaaatattctaatcctgagcgtaatgaattaagcatgacgtttagtttccatcatttaaaagtagattatccgaatggtgataagtggacgaaagcagagtttgattttattaaattaaaagagattatgtctaactggcaaattgaaatgcaaaagggcggaggatggaatgcgttattttggtgtaatcatgaccagcctcgcatcgtgtcacgctttggtgatgatggaaagtaccgaaacgaatctgcaaaaatgttagcgacagccatgcacatgctgcaaggaacgccttatatttatcaaggggaagaaatcggtatgacgaatcctaaatttgagtccatcgagcaatatcgtgatgtagaatcgttaaatatatacgatataaagctaaaagaagggctatcaaaagaagagattatagggattttaaagcaaaaatctcgtgacaactctcgcactccgatgcagtggaatgaagagatgaacagtggttttacaacaagtacaccttggatttcagcggctgaaaattttaaagaaataaacgtagagaaggcattagaagataaagagtccgtattttatcattataaaaagttaatagagcttagaaaaacgtatgatgtaattacagaaggagaatatgctattttggataaaaatgatcctaaaatttgggcatatactcgtactaaagaaagtgaagtgctacttgttataaataacttctatggagaagaaataacgtattcagtaccagcgcacgttcagttagatggaatgaaacaagaagtactactgtcgaattataaagatgccagcaaggatattgcaaaacttaacttaagaccatatgaatcaattgtgtatcgatatacgaaataaaaaggttgtatgcccgagcggcatacaacctttttattttaagacaccactatacaaaatgcttacttctacttcaggtttgaattttacttttgcataatctttattccaattttttttcttccataagttaggatgataagcgataagatgtcttccaataccgaaagcatcacaatttgctttttgtagttttcgtgttatttttttcgcttctttcgtgagttgtttagaaagttctttatttagtttttctctatcgtccattgtatacatattatctcttggagattcaagtgctataacttttaattggagcttaatgtgagcataaacatttccttttttatctgttgttatttttaagtcgcgttttaattttcgattactaatttccattgttaaataatcagatgtcttctcagattcatcactagtcagtttttgggttatacgggcacttgttcccatttttccggttaataacacgaataaaacagattgttgcaaaggtaaatgcccagttaatttatcattgttaaataaagctaacccgtttgtaactacttcttttccttttatttttatagaaggaagggtaaagtctttaccgggatctaacatttttgtagcagctgtttctaaagtttcttttggaaatacactcatatcttctaagcttttcacttttttctttagaaaatctccaattagtaaatttcctattttctttttttcgagtatctccgatgtttcaccatctactgcaataagttttactaaagcagttgggtttgttggatctcgaaagctgacatctaaataggggagtatacccttttttagaattttggttccgagtaattgaacaccatatttaaaatagcgaatattcccagtcacatttttttttagggcatcgcctgtatccattatgttatgcccggttgctgaatatatttcattctcaaatgaagattgctctccgcttgaactttttacaagctcgattgtttgctggagtttattctcttccgtaatatcagctccaacgctataagctaaacttgcctcccttaatggttcttgatcccaacagccagaaaggagggaactagtacataatattaaaagtaatttaactctttttgggaacatactgttctcctttcttctttcttattattgaataaagtagaaataaaagagggaggacaacgatgaaaatataggtgaacttatcagtgaaagttgaaattacttttaattcttcaggtgtatctataaataaggctacactaaaagcaataataccaacgattggaacagcctttttatgattagcaaggttgaatatatgtccaattccgattgaagcagcgcagtaataactagcaatagaagcgacaactgttatcatccaaattgggatgaagattaggtccgttcgatctataattccaatatgcaaggagcgtaataagtaagcaactggctctggaataagctcaatttgctttggactaaatacgataaagcaaatccaaacggtaaaagtataaaaaagagttacaaatccattggcgatagaaatggccttcagttttgcaatagaactcccatttacttttgggaaagcgataagaataatttcaaaaccatacatggctgtaattgtttccttggatgcttgaattatattccaccatccggcttctgtaataggaaaaatataagagaaatcagctcgtgaaagccctagggcaattaaaagggccattggaataatgagaatagaggccatgacataaaatcgtacgatgactttaaatgtgttataagctacataacaacaagctactgtacataatatgagaattgcagaccacggagttgcgtgtaaaacccatactttaatgacgttacaagcattcaacataaccgtcataccgataagggtaaaataaaaaacataagaaaagcccaatagttttcctaacttattaccaaatagcatacaaacacttttatacatatctgcatcaggaaatcgttttaagaaaagccacataagtaaaataataagttgaatggcaagccccgcgatgagcgcagaaatccaaccaccaccttttgctatcggatgaagccggttaggtagagatagtataccgaccccaatttggcattgaataacgaaaaaggtaaattgaacaagtgaaattttactttgcgtgtttgtcaccgtcctcatcctctctcgttacatgttggcgctgcatttttttcggttttggatcatgtggtctttcccaaaatgaccaaattggtagtcttatgaaagaatctttcatatctttaatccgcatcggggcaacaggagaaagatatggtgtatgaaatgaatgaagctgacataagtgaacgaaagttataatgagaccgaatgatattcctacatatccgaatatggcagcaaggagcattaatggaaaacgaagaatccgaactgctgaactcatatcgtttgatggaacgagaaaagatgagattgcagttaaagctacaacgatgatcattgtgtaagaaacgagtccagcttttacaattgcatccccaattactaaaccacctacaataccgattgtttgtccaacgcggctcggcaagcgaataccagcttctcgtaataactcgaaaattaactccattaagagagcttcaaaaataggaggaagcggtactttctctaatgaagctttaatcgtatacacaagttcgagcggtaacacatcaggatgaaaagcaacagttgcaatatataaagctggtaagagaaaggcaattaaaaaacttactaagcgaatcattcggacgaaagaaccgacaatccaacggttattataatcatctggtgattgatagaaagcaaataacgtaacaggaacgatgagcgctgttggatctccatcagataaaatagcaacacgcccttccattaaattagcaacagttctatctggacgctctgtatttaattgctgcggaaatggggagaaagacgtatcctctataaattcttgtatgtatcctggtggcataagtgcatccgttttaatggtttccaatcttcttttcacttctataactaaatcgtcattcgctatattttgcatataagtaattgccactttcgtgtgcatttcttcaccgagtgtaaaatacttaacaactaaatttggactcttaatgagtttacgaatagaggttaaattagttgctagatcctctacaaaaccagtatgtggaccgcgcacaactccttcattatcaggctctgctatatctctctttaaagataaggttgtttcgaaaatacaaaaactgtcgacgtgttcatgaaaatataaggatttaccttgtaataaaagttgtatcccataatttaaattcgtttcttttttcatatttaacgtagaaaaagctttatctaaagataaagctgatcgcgttaataatggctcaaggactaactgatgaattagatttggatctgctaaagattcgatatataagattgctccttttccgttttgaaaagggagatctaatttttttatatcatcagaatgagaaagtttattttcaatgtaattaatgttctccggaagtgatggaaacatatgcttttggtttttactctcttgttgttctttttgctctgtcataatttccacctctcttaaagtgcaattgtttctgttaatttttgtcgtttgtgagaaatttatgcttgaattattttaaaaaaagaggattgaaggttacgttacattgtcttttgtgcattattcaatttcatagcagtacttctaacatttgtgtcgaattaagaagatatataggagggatacatatggaaatagctgtagaacgtgtttttacaaaagagattttaaaaagagcagcgagtttgtttcatgtaacagtggaagaaaagccacttggagattttgaaaattatatttttaaggcaaagggtgattgtggcgaagattacgtattgcgtttaactcactcttctcatcgctccaaaaaagaggtagaggctgaactagattttttacgatatgttgcggagaatggggcaaaggtagcaggacctctttattcaacgtctcaaaatcttgtagaagaaatcgtagcagaggatgaaactttctttttcgcttccttatttacatatgcaaaaggtgagcaagtaaaaggagaggaatcgccttattggggcgagcctctctttgaagcatggggaaaagcgattgggcaactgcatcgccttacaatggaatatcctaaaacagactatcgtgatacgtgggaagaagacgagagtgggattgttaatgaactagaagatgatcaagtgaaaaaaatcgctgcggtattaatggatgagataaaggctctttcaattgaaagagaaacgttcggccttatgcacggggatattcatccaggtaattttcattatgatggtaaagagttaacaatctttgattttgatgatgcagcttataattactttatacatgatttagcgatggttctttattactctgttctatttacaccgtggacagcagaagagaagacagattttgctcgtaaacagttacaagtgttacgaaaaggatatgagtatgagcacaggctggcggatagttggtatgaatcgttgccactatttttacgtttacgtgatataggtttatatggaacgcttcagaagaagtttaaagggaaagatatgcctgataacttcttgaaattatcagaagagctatacgaaagaattattaaaagagaagcaattgtgaatatataatacatttagttcaaaacaaagtatataaaacaaatatatactttgtttttttatacaaaaatatgtttactttattaaaataatattgtcctagattcggtatgcacttataattttatatatattctgaatattctttataaagaaggagggggaatgttgggaactttcgtaaattggttaaataatattgtttggagtccagcacttgtttatttatgtttaggagtaggtttatatttttctattcgaacgaagtttttacaagtaaggcacgtaggagaaatggtgaagctgacatttcaaggagaaaaatcagaggctggtgtttcttcattccaagcgttagcactttcgttatcaggacgtgttggaacagggaatatcgctggggtagcaacagcggttgcattcggtggaccaggagctgtattttggatgtgggcagtagcctttttaggggcaggatcagcttatgtagaatcaacactcgcgcaaatatataagacgaaacatcaagggcagtttcgtggtggacctgcttattacatcgaaaaaggtctaggagttaaatggtatgctttagtattcgttgcagcgacaattcttgcaacaggacttttactaccaggcgtacaagcaaatagtattgctgtaagtttagaaacggcttttggtattaatactaccgcatcaggggctatattagttgtcgtattagctcttatcattttcggtggagtaaagcgaattgttaacgtagcgcaagttgtcgtaccttttatggcaataggctatattttagtagcttgcgtcattgttgctatgaatattgaaaaattgccagaagcatttatgttaattataagaagtgcatttgcattagaagctgctttcggtggtattatcggtttagcaatctcttggggggtaaaacgtggtatttattccaatgaagcaggacaagggactggaccacacgcagcagcagcagccgaagtatcacatccagctaagcaaggtttagtgcaagcattttccgtttacattgatacattatttgtttgttcagcaacagcatttatgatgattattacaggcatgtataacgtatttgatgcaagcggaaaaaactttatcgttaataaactaaatggtgctcagccaggaccaggatatacacaggcggcggtagaatctgttttccctggatttggaaacggtttcgttgcaatctcgttattattcttcgcgtttacaacaattatggcgtattactacattgcagaaacgaatattgcgtacttaaatcgtgataaagaccgtccttggatgtctatggtactaaagtttgtatttttaggagctgtattctatggatgtataaaaacagcagcaacggcttgggctttaggcgacattggggtaggaattatggcatgggtaaatatcattgcgattttactattacaaaaacctgcattagtcgcattaaaggattatgaaaaacagaaaaaagaaggaaaagatccagtattcgatccaaggccattaggaattaaaaatgctgatttttgggagcatgaatacgggaaagataagaaagaagaagtatcttaacagaatagaaatgaagaagcaaaggggaaactctttgcttttttttatggacaaattgaagctaaaagttatttttgggactatttttgaatataaaaagaatgtacatgcattgttaggggaagggggagtatgttgatagaatttcgtaatgtaaataaatattatggtaactttcaagttttgaaaaatattaatgtgcaagtgaaaaaaggcgaagtggtagtagttgtcgggccttcaggatcaggaaaaagtacattgcttcgatgtataaatcaattagaggcaattacagatggagaattaattgtacaaaatacagaggtacacaataaaaaaacggacatgaatgaattgcggcgaaatattgggatggtctttcaacatttttatttatatccacataaaacggttcttcaaaatattacattagcaccgattaaagtaaataaagtttccaaagaagaagcagagaaaacagcaatgttttatttagagaaagtaggaatcccggagaaggctaacgtatatccacatcaattatccggaggacaacagcaacgggtggcaattgctagaggacttgcaatgcagccggaaattatgctattcgatgagcctacgtctgctcttgatccagagatgattggagaggtacttgatgttatgaaagcactggctaaagaagggatgacaatggtcgttgtcacgcatgaaatgggatttgctagagaggtagcagataggatcttatttatggatgatggtcaaattattgaagatacaacaccggcgcacttttttgtaaaccctgaacaagaaagagctcgtttatttttaagtcgggtgctaaatcattagaggaggaatttcatgcttaaaatgaaaaaattatttactttaatcgtattttcatgtttattcgtgcttgttgttgctggttgcggaagtaagaaagatgaggcaaaggaaacaaatacgaagcaaggcggggctgttgagcaaattaagaaacgagggaaattagtagttggggtgaagaatgatacgaatttatttggattaaaaaatccttcaacagggcaggtagaaggattcgatgttgatgtcgcgaaggcacttgcgaaaaagattcttggagatgaaaagaagctagagctgaaagaagtaacgtctaaaacacgtattccaatgctgaaaaatggtgatattgatgcaattattgcaacaatgacaattacggaagaacgcaaaaaagaagtggatttttcagatgtatattttaaagcaggacaatcgttacttgtgaaaaaaggaagcaatattaagagtgtcgatgatataaaacaaggcgttaaagtattagctgtaaaaggatcaacatctacaaataacattcgtcaaaagtcaccagaagcgactgtattagagtttgaaaattatagtgaggcatttacagcgttaaaggcaggtaaaggtgatgtgttaacgacagataatgcgatcctttacggaatggcaaaacaagattctaattatgaagtagtaggaaaaattttcacagatgaaccatacggaattgcagtgcaaaaaggggcagatgatttaacgaaagagattaatactttaattaaagacatgaaagcaagcggggagtatgacaaattatatgagaagtggattggacaaaaaccagaaaagtagatagtaaaagtgagaggatgagagtgctcatcctcttcttgtaaagaaagaggggagaatatgtgcctgatttttctatattaacgaataacattgatatgtatttagaaggatttaaatatacagttatgtctagtgtaattgcattgataggcagttttattttaggagtaattttggcagtaatgcgtattgcacctattcgtattttaaattggataggatcagcttttgtggagtttgtaagaaatattccactcgtattaattgcatttatattctattttgctttacctgtaataggaattactttaaatggttttgtagcaggaacagttacgcttacggtatatacggcagcttttattgcagaagtaattcgcgctggtattttatcagttgcgaaagggcaaatggaagctgcccgctcttcagggctaacgtatgtgcaggcgatgtattatgttgtcttaccccaagcagtgaaaattgtaattccccctttaggaaaccagtttctcaatttagttaaaaactcctcaatacttggaattattgctggtgctgatttaatgtatcaaggagatttaatttcaacgaagacgtttgttacgtttgatgtttatatatttgtcgggatgttttatttaatattaacaattccgctcagtatgctagtgcgttatttagaaaaacgcttggcaaaggaggcggtgtaaatggatttcaagggagcaattacaggagatcatattctatttttattaaaaggattacttataacattagaggtagcgctcatagcaattgtacttagttttattattggaagtgtaatcggtatattgcgctacacgaaaatacctgtcgtctcacaaatattaggagttatagttgaagtgattcgaaacttaccactactgttaattatatttttcacgtattttgcacttccagaagcaggcttgaaattagaaattataacagctgcaattgttgctttaacaatatttgaggcagcaatgatatctgaaattgttagaagtggtttattgtctattgaaaaagggcaggttgaagccgcaagatcttcgggattaacttatgtgcaagcgctttggcatattattttgccacaagcattaaggagaatggttccgccgcttgtcagtcaatttatttcattgctgaaggatacgtcgctagcggttgttatatcactccctgagcttatgcataatgctcaaattattagcgggcaaaatgtgaattacatgattccaacatttatattagtagcttgtatgtactttatcgtaaattatagtttatcaattttatcgagaagattagaacttcgttgactcttacaatatatgtaagggttttttccttgtttctccttattttcctctaaatagaatctaaatcttgcaataattcgatttttatattattttatcagaaaagttttaattttatatagaaaatgtaatcgctttcgtgtatatttttattatcagaaaattttaacaagatataggggtattggtagggggaggatttagatgcagcaaccaacgaatgagaaattacatcgtacgatgaagagtagacatttatttatgatcgcacttggtggtgtaatcggaactggtttcttcttaggttcaggttacaccattaatcaggctggaccagggggagccatcctttcatatttagtaggcggatttattatgtatttaacaatgctttgtcttggagagttaacggtagcaatgccagtttcaggttctttccaaaagtatgcaacgaagtttattggaccaggaacgggctttatgattggctggttatactggcttggctgggcagtaacagtgggtctagaattaacgtcaataggtttaatgatgaaaagatggtttccaaatgttgatgtttgggtatggtgccttgtattcggtgttattttatatgcttcaaacgcaatttcggcaaaaagttatgctgaattagaattttggttttctagtattaaagtagttaccattcttgcctttgttgttcttggtggtagtgcattattagggtttatatcatatgacggaaaagaagcagcacctcttttctctaactttgtaagcgatggtggattatttccgaatggactagctgccgtattacttacgatgattacagttaacttctcgttccaaggaacagagttaatcgggattgcagcgggagaaagtgaaaatccagaaaaaacaattccacgcgcgatccgtaatacagtatggcgcattatgttattcttcattttaacaatgacgattttagtagggttaatttcttggaaagaagctggcgtaattgaaagtccattcgtagtcgtatttgataaaatcggtattccgtatgcagctgatattatgaatttcgttattattacagcgttactatctgtagcgaattcaggattatatgcggcaactcgtatactatggtcacttgcaaatgaaggaatggcaccaaagtctttccaaaaagtaaataaacgtggtattccaattacagcgttagttgtaacaattgctgtagctgctttatctttattaacaagcttccttgcagaagatacagtatacatgtacttattatctatagctggtttatcagctgtttcaagttggatcattattgctttatcgcaacttcgctttagaagtcagtatataaaaggcggaggaaagttagaggacttaaagtatagaacaccactatacccaatcgttccaattttagctttaattacaaatagtatcgttgttattagtttagcgtttattccagaacaaagaatggcgttatactgtggtattccatttatcattttctgctatatatattattatattagtaagaaacggcagaaaccgatgaaagtggagatggaaaaaacaaatgaaactaacaatcaaacacgatgatatagaagcagatttatcgtatggtcaattagcgattggaaaagaaaacggttattcaccgttacaattactcgtttcttctatcgcagggtgtagtgcaattgtctttcgaacgattttagaaaagaaacgtattccatacgatacgtttacaatcgaaactgaaattggtagaagtgaagcgttatcgaagccagttgaaagtgttcatttgcactataaaattaaagcgcaaaatattacagaagagcagctggacaaggcgctgcaacttgcagtgaaaaattgtacgattgttcaatctgtaaaagatagtataaaggttacggaaacaattgaactaataaaatgaaacataaaaacgtgagaatacggctctcacgtttttatgtttttaataaagggggaaatatgatggaatgtttagggtgtaaattagcaggcggagaggaaattatatatataatatatgaagatgattatgtaacttgctttttagatcatgcgcctttctacccaggacatactttaattgtgccaaagcaacatgttgtagaagtagatgaattaaatgatgttgtagcaaaatccgttatggatgcttctaagcttattgcaaaagcgattaagatagtatataaacctgacggagttacagtttgtcaaaatggtggagtatttaacgagttaacacattatcatatgcatgtcgtaccaagatataaagagcgttcgtttgctgagttttatatggtacaaccaggagaaaagcagaatcataacttggaagagacacagaatttgttaaaagaagcgatagagcatatgctgcttactgaaaaggcgtagcggtcaggaaaattctaatattaaaaagcccaatttctcagttaaaatagagaaattgggcttttgtttattctattattaaattttatacataaaaagattttgcagtgtcacaaagtatagcgcttattcgttatatagagtgagaggaggaattatatgaaagttacaaacaacgattatgaaaagatggaagagctatatgagttgtatgaacaaaagatttattatgtagcgtattctattttaaataatattcaacaggctgaagatgcggttcaagagacgtttattactctttataagaacttggaaaagctccatagcttggctactcaagagcttaaacgctacattttgagggtcgcgaaaaacaaggcgattgatagttaccggaaaaacaaacgacatgaaacatttttagaagaatatgaaagagaatctgtagaagcagtagatgaaaatattgaagagtgggaaaaacgtaaaatgtctgaggttcaaattgatgcattgctaaaagagttaaacgaatctaatagacaggtgtttaagtacaaagtcttctataacttaacgtatcaagaaatttcaagtgtcatggggataaccgaggcaaatgtccgcaagcagtttgaacgcgctcgaaaacgagtccaaaatatgataggaggtatacaacatgacgaattcaaagaactccaaagaaatatatgaacttgctgaaaaaattgctttagatgattttgataaacttgaagaacaacatgaattttcacatacatatacgcgcaaaaagaaattgtttatggaggaaatgaagccgcaaaatggacaaccgctgaaaaagcgtaaaagacatcgtatgttaatcgctgctgcttgcttattgatcggcatgccgacaaccgtttttggagcagtaaaggtctataatatgattgttcaaaaacaaaattatgaagtaaatatttcagtaacaaataaggactcgaaaaaggctgataagtggtataagctgaaaatcgataaattaccagaaaatatggaagcaattgatgactctgctatgaaatattcctttaaagataactacgcaatgggtggattttcattcgttctttggagagtaggagggaattcagattttccaactctgtactcgaaaaattatgaagaaaaagagataaatggtaagaaggcagtaattgtccatagagaaaatggtaataaagatttaatgtttaatagagtaatttttctctattttgaggaagaaggaattatgttacaaagttatattggaaatgatataaacgaagaacaaatgatagatgtgctagggagcatttcacttgagcccacgtcaaaagaaaagtcatcatatataagcgattatgataaaaagtattttagccaagaaagtaaaacaactaaggtaattcctttgaagaaggatagcaaacgactatttcatataggacaaaaggttccagtaacgatatctatggataacagccaaattgaatatgtgatagaaaaagttgaagtttttgattcaatcaaagattttaaacaagagaactttaatgaacttggcctagagatattaagcaagaataaggctttagatcagacgggaaaattactatcatacagacgagatgaatataaattagggaatggtaaagattcaattgatacattagtagattcgaaattagttaatgttaaatttgtctacttaacaacaacagtgaaaaatattggcaaaaagtcgacagaagaaatctatatgcatccatccataaaacagcttaaatttgaagggaatgcatggaaatacgctaaagaagaggggatggacgcaacgcgtattatgacaggtgaagttgattatttagaacctcacggagatggaaaaagtttttacaatattggcagtatcacaccaggagaaacggtaaaagttaatttaggttattttgtagatgaagataaattagattcaatctttttggatgctttcaattacagagggattggtgacactgaaaatatgaattcgaaaaatcgttggtggtttgatattcgtcaataataaaacaataggaacaacaggacaaagaagctgcttatatttagcagcttttttcgtcttcatacatatgtaaaacttctttcgcacgcatacgtaaaccatctatcaattctgtcggttctaaaacttttgcatcttttccgagtctataaaataaaggggtaataaaattgatttctcctttatcaattgttgaatgtatatatcctgtcccgttttcgtttgttacaacgaattcttcaaggtaaggcacgcttttacattggcgtacgccttctggtgtcagtaaaacatgtaactgagtagggatgtgtactacgttagagttagaggaaaaccactcttctaaattcatgaatgtatcctcattttctttcgttgataatatagaaagaatacgatcgatgcgatacagtaatacttttttcctgtcatagtcataggacggtaagtaccatagcccgtcatgagcatatacaccgataggatgaacatgttttgtttttatccccgttttagattcgtattgaaagtgtaaatttttattttcaatagccgctgttaacacttcgtttaaaagtggtgtatcaattgttctctttggattccaaaaggcgatataagaacgtattttgtcaactttcgctttcgcatcatgttgtagggagctatatagtttatgtgtaacggaatttatttctgtgttaaaaggtaagtctctgtagtagcttaaagattgaaaggcaaaaaagatggagactgcttcttcttcggtaaataaaataggtggaattactctattcgttaatactttatatcctccgttgcgaccttgttcagcgtaaatgggtaatcccatatcacttaaatctaaaatgtatctatggacagtacgaacagaaatattaaattcatcagctatttcttgcgctgtaaatgcttttttcgcagaagcaaatataagaatatctaataagcgtttagcttttgacaaatgtatcaccttttttctttttaaacatgacataaattgtcgtgttttattgttagtatattgtttacagcataatgttatcaagatgagatgtaaggaggaaaaaatatgtcacgtgaaatagttttatttattgcggcgagcttagatggatatattgcgaaagaagatgatgatttacagtggttaatggaaaccgaaggggagggagataacggttatacagaaatgtacgaaacgattgatacaataattatgggaaaaagaacgtacaattatgtagtagagcatacagaaacattcccgtacttagataaaaaatgttatgttttttctaattcggaaaaaggttcaaacggaaacgtggagtttgtaaatgaagatgtagtagagtttacaaaaaggttaaaatcgcaagaaggatctaaaatatggatggtcggtggagggaatctactgagagaattctttaagaataatctaattgatgaatatgttgtcacgattacccctcacatattaggttctggagttccgttatttcaagataagaatccggaaattaatttaactttaacggatacgaaacgttttgggcaatttgtaaatttatattataaagtaaaatgataaagaaacacgactactgatggtagtcgtgtttctttatagatggcaatgaaatgataaagcaagacccgtaatcgacttcgctcgttacagtaatatttccgtcgtgtagttctacaatttcttttacgatagatagccctaaaccagttccgcctgtagatcgtgttcttgctttatctacacggtaaaagcggtcaaaaatgtgagggaggtcttcaggtggaataccttcgccttcatcttcaattgtaatggagatacgtttatgttcttctgtgatagaaatgtttatatgagaatgttcttttgaatgtctataagcgttatttaaaatgtttactataacttgttcaaatcgctgttcatctaagtttactagcagtgtaggaggacaagagaaagaaactttaatgcatctttctttatacatggcatttactttttcggctatgcgagttaggaatgtgtgtaaatgtacttcctttacttgaatagaaaagttatgttgttccatttgtgcaagtgaaaataaatcttgaactaagtttgtaatgtaatcagactcatcttttataattgataaatatcgcatacgttgttcagaaggggtgctttcttttgaagcaatgtcagcataacctcttacgtatgttaacggtgttcgtaattcgtgagcaacacttgctagaaattcacttcgctctgttttcatataatgtaaatcatttgcgagcgtttgaatagatgatgctagttcaccaatttcatcatttcgagtagtcgttaatgaaacggacaaatcgcctttactcattttttcagttgcatgtttcatgtgtaacaatggttttgttaataaacgtgataataggaaaattgtgatgactgtgagtagaaacgtgatggcgccagcaataatgaattgtttcgttaatccatttaccaacttttcaatggattctgttccaagaaacatatacacatacccttcatgttttccagctactatgataggactaactgtacatatataattagatgttttccagtgattttctataatcgctccgttatggtctgttcgagtctgcatgctactaatgtgattttttatagtcgtgtttatttcgttagatttagctagcacttctttatttgtatttgtaataacgacagttgtttcagcttcagattccattaatgctacgtgagagattgtttgcttatcataatatttttcaagtacatcacgatgactgtttccacgttttaataaagctgtcatttcttcatttactctagtgtttacgagactataatagagcaatacaaatagaacactttcaattaaaagtgtaacaattaaaaaataaaatccgaattgaattgaaattcgtttcatcgttttaccccttactgttcagtatcaatccatcgataacctactccatacacggtttttaaatgatgatcaatagggaaatttgcttttcgcaatttatcacgtaaattacgaatatgcgaatcgactgttcgatcttctgtatttgtatttaatccccaaattcgttcaatgagctgatcgcggcttaatacgtagttcacatgacgtaaaaataatccgagtaaagaaaattcaattggtgtgagaaggagctcttcattatggacagaaacgaagtgttttgtttcatcccatacaataccgtgatattggatttgtttatgttcatttgtacgtcttaaaacggcttcaattcttgcgaaaagttcttcttcatggaaaggtttcgttacgtaatcatcggctccaagttttaatccttgaacgacatctactgtttgatcacgagctgtaaccataataataggaatgttactaaaagatcggatttttttgcacgtttcccatccgtccatctttggcatcataatatcgagtaaaacaaatttaaagtttcgattttctatatgtaaaatagcttcttctcctgaagtcgcacatacgcagttatatccaattggtgtaagataaagcgttaataattcaagcattctcggttcatcgtctacgagcagtatatcaatcatagagagccctccatatttataatcgttacttaaagtgtaatgcaaaatcatgaagaaatggtgcagattatgatgcgtctgcataatttcttcagaattgcttgttattgtggagttgaaattacattttaggtaatcatattggctcaaaaatgattaatacggaggcggtatagtgaaaaaaatgacccgaatttttgggataacaataattacagcagttggtcttactgcatgcggacaaacgaatacagaccataaaaaccatgaatctacaaaagagaagaaaacagagcaaaaggaaatgaaaatgaatcaggaggtaacggcgccaaaagaaatgaacgaaggtgcatctaatgatttattaacgacaagtttaaaaaatgtaacgagattaaacacaaatgaccctttgcaaatggcagtattaacttcgcaaacgatatggccagcaactcataaggagaaccagccaggtgctgttattttagtaccagcaagcgagtggcaattaggtattgcgagtgcagatcttattcatcatccgaataacgggccgattttatttatagaaaaagaaaagataccggaaatgacgttaaaagaaataaaacgattaaatccaatcggaacgaaagatggaacacaaattatggtgatgggagatgtaggtactagcgcgcttgaacaattaaaaggttataaagtaaaacaaataaaagaaacggacccagctatatttgcgaaggatgttgataaggagtatgccgatataacaggaagctatccaaatagtgttattatcggttcgtctgcagaagaaggacgtttatatacaacccccgctgtaaattggatttctcatatgccggaaccactactctatacagaaaagaataaagtgccagaagcgacaatagaggcattaaaaatgagaaaagataaagcaaatatatatgtattagggccagaaaaaattgtttcaaaagaagtagaaaaagagctaagcaaatacgggaaagtaacgcgtattagtggagagacccctacagaaaactcgattgcgttcgctaaatttaaagatgaaaaaacaaaatttggctggggattcacaaaacctggtcacggtttatcatttgtttcaagtaaaacaccagatttagcagttgctggggcacctttttcacatatgggtaaacatgcacctgttgtattattagaagaaggtaaagcttcacaaccagtgtatgacttccttgcaagcattcagccgaagtttaaagatgatccaacacttgaaccatataatcacggtttcttattaggaagtacgagtgatatttcatttgaaacacaaggaatactagatgagaggttagaaattgtttaggaaagtggtcaaggacacggtggacattaataaaatgagcaaagacgctactgatatagcgtctttttctttaggaaacttttacatagtaaaaaatcttctactcgttatataatagccttcgtgcagtcggctagattttcttatggagaaaatcaaatgataaaggagtagaggagtggtattttgtttcaaacgataaaaaatgattggttttctaatgtgagaggggacgtgttatcaggaattgtcgttgctttagcattaatccctgaagcgatagccttctctgttattgcaggcgtggatccaacagttggactatacgcagccttttgtattgcagttaccatttcatttgttggcggaagaactgggatgatttcagctgcaacaggtgcaatggcattattaatggtaacgcttgttaaagatcatggtttcaatcggaacgtttgattggaactctgtaacaacaattcataaagtaccaaaaggaaaggcatttgttatgatcgtaacagttgtgattgtcctaattacacataatttagcattaggtgtaattatcggaacagtaattagtgcggtgttatttgcattcaatatggcaaagattcacgtgaaacatttatatattgaaaataagaaaatatacgaaattcacggtcaacttttctttgtagctacagccgatttcataaataatttttcatttaaagaagatgtaaaaggaattgaaatgaattttactcatgcgcacgtatgggatgattcagcagtggcatcaattgataaagttatcatgaagtatgaacaaagtggtgtgaaagtaactataacaggattaaatgaacgtagttcaaaacttgttgcaaatttagcgacttataataaaagaattgctagttaaaagcctcctttttagggggccttattatataatacgagtaggataacgaaaaggggattcagcatatgtacaaacaaattatattagcatgtgacggttctgaacatgcacttcgagcagcagagcatgcaacatatattgcgaaatgtagcgaagaaacaaatgttgaagttgtgtacgtagtagataatagaacggcaaaatcagatattatacaaggtcaaacagatttagaaacaatatcggctagtcgaaaagataaattaaaagagattgaaggtttattaaagaaagagaacatttcttatacaattacgatattacatggtgatcctggagatacaattgttcaatatgtaaatacaggagatatagatcttgtcattgctggaagtagagggctcaatacactgcaagaaatggtgcttgggagtgtaagtcataaaatagcaaaacgagtgaaatgtccggtgatgattataaaatgaaatagaatgtaacgaagaccttagtataactgaggtctttttttatgtataaatgactcttatttgtggaaatactagatatataagttgaaaagatgttaacttacaaatttgtaagttagttgttagagaaatcgatgttatgagatttttcccattggtaaaataaaagtatcaaaggggagatagggaggatggaagtaatgaaatcatttcaaaatttgtcatatagtcaaggggtaagcttaatttgtctagggggatttgctacatctgttacgttagctgttttaataaaggtgtttcatcaaatcttttaattttatagtagggaaggaattggttgttatcattagtaggaacagcaatgaaaataaaaaatagctcttagcatgtatgtaaatgctaagagctatttttatgcttgttatatgttatttaagcttgcttttgttttactgaccctgtatttaaagtaagagcaaggaagaacattgcaagtacgcaagatgcaagtaataagatgaatccgccatcccatccgaatgcatctacgataaagcccatagctgcactagcgaaagcagctccgcctaagtaaccgaagaatccagttaagcctgctgcagttccagcagctttctttggtgctaagtctagagcgtgtagaccaattaacataaccggtccgtaaattaaaaatccaattgcgacaagtgcgatactatcaaccattggattaccaggagggtttaaccagtaaacaagaactgcgataaatacaccgaccataaatagaataccagcaggtgcacgacgtcctttaaatagtttatcactcatccatccgcaaagaagtgtacctggaataccagcccattcatatagagcgtaagcagtacgtgagctactatgagtaaagcttttttcctctactaaataagtaggagcccagtctacaacgccgtaacgtacgaaatatacgaaaacgttcgcaatagcgatgtaccataaaaacttattgtttaatacgtatttaaataaaatttcctttactgaaagctcgcgttcgcggtcttttactttttcatctggtggatattctccagtatgttcttcaatagaaggtagtccacaagattgaggcgtatctttcatcgtaattaatacataaataccaactaaaattgaaagaatacctgggaagtaaaaaatacttttccagtcatctgcgaagaagtataagcctaatgttacaagtgaaggcataagcgctccgccaacattatgagcgacgttccaaatagacatttttgtaccacgttcgctaatagagaaccagtgaaccatcgtacgaccacaaggaggccatcccataccttgtacccatccatttaaaaactgaagtacaaacataagtataatgctcgttgtaatgaaagaaaatgagccgaaaataatattaatgatacctgataaaaatagcccagctgctaaaaagtagcgaggattacaacgatcggatacgatacccataagaaatttacttaatccgtaagcgatagaaactgctgaaaggataaccccaagttcccctttactaaagccttgctcgattaagtatggcattgctagtgaaaagttttttcgaacaaagtagtaacctgcataaccgatgaagatacctaagaatacttgtaaacgtaatttacggtattcgctatcaacgcgatcagctggtaagcgttccgcgtggggcgcaggtttaaataattgtgtgaaaaacataaaatgaaaatcctcccctaattaattcgaagcgttttaagacagagaacataaaaaggccatgaaatataaaaaagtttccttttttatgattcatagccgtgtactccgtttctccgtgactgtcaatattaacttcgtcgaaaattatacaactttgtgacaaaaatgtaaacgtttttatgaataaaagtattgacggattttgttcgtgggattaatatttaaatacattaaatattttattgtttaaataagaggtggataacatgccaaatgatatgacgcatatcgataaaattcaagctcttgccttttcgattggaaagaaaatgcagacggagttattagaacaaatgcaagcgacaggacttacaccaccgcagttttatattttaaagattttagatcattatggggcttcaagagcgacaacattagcaaaaaagatgtatgtgaagcctagcgcgattacagtgatgattgatcgtctaatcgatcaagaacttgtagaacgctatcacgacaaagatgaccgtcgcgttgtcatcatcgagttaacgaaaaaggggaaagctagagtagaagaggcaatgacagctcgtaacgagcatattgcaaaatacttttcacatttagagttgcaagaaagagaagatttattacgtctctttgagaagttagaaaccattatttgcgggacacaagagaaaaaagagaataactaagaggaattgaggagattacatggagcaacaagaaaatcaaaatagaaagttgttgttaatcggtttagtaatcgcgatgctatttgctgcattagatggaacaattgttggtacagcaatgccacgtatcgtcggtgacctaggcggattaagtttaatgacatggttaacgacagcttatatgttaacatcaacgacagttgtaccaattgcaggtaaattagcggatttacttggtcgtcgtaacgtatatataacagggctagttattttcatgattggttcggcgttatgtggtatggcgaatggtatgacagaattaattattttccgtggtattcaaggtcttggtggcggtattatgatgccaatggctatgattattattggagatatgttcacgggaaaagaacgtgcgaaatggcaaggtatttttggtgcgttatacggtcttgcttctgtaattggaccgcaagttggtggttggattgtagatgcagtgaattggagatgggtattctacattaacttaccggttggtattttagcaacaatctttattgcaatgggattaaaatcgcataaacaaacaggaccaattaaaattgatatcgctggaatctttacgatgattctcggtgttgtaagtttattacttgcgctaacgtttggcggaaaagattatgcatgggattcttggcaaattatcggtttatttgcactagctgtaattggtatcgttagctttgttatcgttgaaacgaaagctgaagagccaattttaccaatgcatttctttaaaaatcgcacatttacaatactgaatgcgattggattctttatgagtattggaatgttcggcgcgattatgttcgtaccattcttcatgcaaggtattgtaggagtaagtgctgctgaatcaggaacaattatgactccaatgatgattacaatgattgtgatgagtattatcggtgggcaacttgtattaaaagttggtgtaaaaccacaaattatcgcaggtatgcttattatggccggtggtttctggttattaacaacgatggatatgcacacaacgaagcttacagctacttcttatatgatggttatcggtttaggaatgggtcttgtaatgccgacattaacattagcgttacaagaaagcttcccgaaaaaagaccttggtgttgtaacatcatcaagtcagttcttccgacaaatcggtggtacatttggtattacaattttaggatcaattatgaataacacttcaggtacgacattaacaaagaatttagtacctgtattagatacattcccgaaagaagcgggacaaatggtaacgaaatttaaagatatgattcacacagatccacaaggtttatattcgatgctatttagcccagaggcattaaaacaaatgccagaagcgttcgctaacagtattgtacctattttgaaaaactctttagtagactcgcttcatactgtattcttaacaggattagtatttatcgtagtaggtgccatctttacgattttcttacaaaaaattaaattatcagatcgtaaaaaagatgctaaagagcctgttgtagaagaaaaagaaaaaactgtatcatactcgtaatgaagaagcatcgccttatggcggtgcttttttgagtataaccttaaaagctttttagtgagaaatgattgacgtatttttagaaatacgttatattattttctgtaaacggttacatgaaatgaggagaaaagagaatgagtacgatcaaagacgttgcgaaattagcgggagtatctgttgcgaccgtttccagagttctaaataaaaatggatatgttcacgaagatacattaaaaaaggtagaacgtgcaattgagatgttagattataagcctagtacagtagcgcgttcactgtataataaaaagtctcgtttaattggcttagttgttccaaatatcgtgaatccattctttccggaagttgcacgtgccgtagaagatgtagcacataaacaaggttacacagttgtcctttgtaactctgatgaaagtttagaaaaagagaaacaatatattgatgtgcttagacaaaataatgtagatggatttattgtagcaacgaatccacaaaatagtgttaattacatgaatgtatctgttccagttgttgcgattgaccgtatgtttaatgagcgtattcctactgtatatgcagataactatgcaggaagtcaggctgcgacaaagttgttactagataaaggatgtaaacatattgcacatattcgcggtccacgtgatgtgagtactgcaaatgaacgctttgaaggttttgtagacgttattacgcaaaataatctttcgtatatgattgcagagagtacgtttgatccagcaaatagtgagcttgtagcgatggaattattagaagaatacccgcatattgatggtattgttgctgggaatgatttaattgcgatcggtattgtaaaggctgcacttcaaaaggggattgtcattccaaatgatttacaaattatcggatttgatggcatttctttaacggaaatgatgtatccatctattacaacagttgcacaaccgatatatgaaatggggaaaattgcaacagagttgttgttagagcaaatggaaggaaatacattagaagagaaacattatcgtttgccgattgaaattatagaacgaaatacaacgaagtaaggagatgaaacagatgccaaatattgcagtagtagggagcatttcaatggacttagtggctgtttcaaaaaaacggccgaaagcaggagaaacagtaattggtgaagcgtttcatacaattccaggagggaaaggagcaaaccaagcagttgctgcagctagattaggagcaaatgtagcaatggttggagcggtaggaaatgatgattatggaacagtagttagaaaaaatctagagaacgaacgcatttttatcgattatgtggtaccggttacagatagaacgacaggaattgctcatatcgttttagcagaagaagataacagtattgttgtcgtacaaggggcaaatgctcttgtaaataagtcagttgtagatcgctccaaagaacttcttgtaaaagcggatatggttgttcttcaactagaaattccacttgaaacagtaaaatatgtattggctatttgtgaggaacataatattcctgttatgttaaatccagcgccagcacaagttttatcagaagacattttagaaaaggcaacttatattacgccaaatgaacatgagtgccgcatcgtattagatgatttcatctcaccaattgaagatttattggcgaagtatccaaataaattattgatgacagaaggttctaacggtgttcgtttccataatggcacggagattgtacatgttcctagcattgctgttgatgtagtggatacaactggagctggtgatacatttaatggtgcgttagcagttgcactttctgaaggagagacacttcaaaaagcaattcgtttcgcgaatattgccggtggtctttctgtaacgaaacttggggcgcaaggcggcatgccaacgagagataaagtacgtgaagtgcaggtgattgttggatgaagaaacacggcgtattaaacagtgagattgcatcaatccttgctttacttgggcatacggatacgattgtaattgctgattgcggtttaccaattcctgacggagtaaaaagaattgatttagctgttgaaattggaaaacctagctttttagatgtattgcaagtggtagctgatgatatggcaatcgaaaaagtgacgttagcagaagaagtcattataaataatgcggaagtaaataaagaaatagagcagaaattaatagagccagcatttgagtatgtatctcatgagcaatttaaagagcatacaaagaaagcgaaggcgattattcgtacaggcgaggctacgccttatgcaaatgtaattttacatgcaggcgtgattttttaataaagggaagtgatgggaatgcatattgaaatgaaaaacatttcaaaggcgttcaatggaaatcctgttttgaagaatgcacagtttatgattgaaacaggagaagtccatgcattgatgggggaaaatggagcgggtaaatcaacgctcatgaagattttaacaggtgtatacaaaaaagatggtgggacaatcacgatcgatgggcaagagcgcacctttaaaaatgcgaaagaagctgaagagtacggcatcgcatttatacatcaagaactaaacatattgccgaatttaacagtagctgaaaatatgtttctcggcaaagagttaatgtatgggaaaacaggtattttacgcactcgacaaatgaacgcgattgcgcagcagcaactagcggagttagggttgcatgtaagaggcgctatgttagcagaggaattatcggttggacaacagcaaattatcgaaattgcgaaagcattaatgacaaacgcgagcgttattattatggatgaacctactgcggcactgacggatcgtgaaatcgaaacgctctttacagtaatcaataagttacgtaaagaaggtgtttcattcgtgtacatttcgcatcgtatggaagagattttctcaatatgtgatgctattacgattttgcgtgatggagaattcgtcggaaagagattaattccagaaacatcatttgatgaagtagtgagtatgatggtggggcgcagcattggtgaacgttacccagagcgaaatagtcaaattggtgatgtcatttttgaaatgcgtaacggaacgaagaaagggaaatttgaaaatgtttcgtttcaagtgaggaaaggtgaaatccttggtgtagctggtttgatgggggctggtcgcactgatattatgaaagcgatatttggttatgaacctttagactctggacaaatttttataaatggacaagaagtaaagattgatagtccaatagatgcaattagacaaagaattgctttcattacagaagatagaaagtctgaaggattagtgttagatttttcaattcgagaaaatttagctttaccaaatttagaaagtctttcaaagggaagtgttctaagcaacgagctagaacaacagtttacggcggatatgatgaaacttcttaatgtgaaagcatctagcggagagcaggcagtgaaatctctttctggtggaaatcagcaaaaggttgtaatcgcaaaatggctaggcattcatccgcagttactcattttagatgaaccaacaaggggtgttgatgttggagcgaaaaaagaaatttactctattatgaataagcttacggagcaaggagatgccgttattatggtatcatctgagcttccagaagttttagggatgagtgatcgtgttcttgttattcatgaaggaaaagtaggcggaattttagggaaagatgaggcatcacaagagtctattatggcactagctacagggggagagtaaggatgactaagaaggggaatgtattacaacaactcggttctttaatcggtttagtattaattatcgtcgtaattacagctttaaatccagcgtttattgaaattccaaatttatttaatatactgcgtcaagtatcgattaatgcgcttattgcattcggaatgaccttcgtaattttaacagggggtattgacttatcggtaggttctattttagcattatcaagtgcacttgttgctggaatgatggcaagtggcatggatccgttccttgcaatggcagttggattattagcaggtcttgtaatgggaattgtaaacggtatcatcattgcgaaaggaaaagtagctccatttattgcaactttggcaacaatgactatttttcgtgggttgacgcttgtttatatggacggacgtccgatcactggtcttggtgatcatttaatgttccaaatgtttggccgcggttattttcttggtattccggtaccagctgttacaatgatgatcgctttcgcagtactgtacttcattttgaagaaaacgacatttggtcgccgtacatttgcaattggtggaaatgaagaagcagcagcactatcaggtattaatgttacgagaattaaagtaatgatttacggtctttccggaattttggcagcgcttgcaggtattgtcttaacatcacgattagattctgcacagccgactgcaggtacttcttatgaattagatgcaattgcagcagttgtattaggtggaacaagtctttctgggggaagaggatggattgttggtacattcatcggtgtacttattatcggtgtattaaataacggtttaaatttattaggtgtatcttctttcttccaacaagttgtaaaaggacttgtaatcttactagctgtattaattgatcgcagaaaagaagcgtaatggagggacagttcatgaagaaatggttacttatactcgttgcatgtattatggtcattactgctggttgttcaatggaaccgccagaatgggcaaaggattctagcgataaaggtcgaaataaaactattaaagttggattctctgtttcaactttaaataatcccttttttgtaactttgaaaaagggtgcagaaaagaaagcgaaagatagtggcatcgaattaattgctgttgatgcacaaaatgatgcagcaaagcaaacgaacgatgttgaagatttaattcaaaagggtgtcgatgtagttgttattaatccgaccgattcagatgctgttgcttcagcagtaagtgcggcaaatgcagcaaatgttcctgttattacagtagaccgcgttgcgaattcaggtaaggttgtttctcacattgcttctaacaatatcgaaggtggtcaaatggctagtgattacattcgtgaattagttggcgaaggagcaaacgttgctgagttagaaggaatccctggatcttccgctgctcgtgaacgtgggaaaggattccataacgtagccgataagtctttaaaagtagttgcaaaacaagcagctgattttgatagagcgaaaggattatctgttatggaaaacattttgcaagcaaatggtgatattaaagccgtgtttgcgcataacgatgagatggcattaggtgcacttgaagcattgaagtctgctggaaaaacagatgtagtcgttgttggatttgatgcaacagacgatgcagtgaaagcggttaacgatgggcgtatggctgcaacagttgctcaaaaaccggaattaatcggggagaaggcgatgcaaacagcaaaagagataacacaaggtaaaaaagtggacaaatctattccgattgaattagagcttattaagaaaaataaataaatataaaatgaaaattaggaaggaagaacaacaaatgaaattctttattgatacagcaaacgttaacgaaattaaagaggcaaatgaattaggtgtattagctggagtaacgacaaatccatcacttgtagcaaaagaaggcgtagacttccacgaacgcattcgtgaaatttgcaacgttgtagaaggacctgtaagtgcagaagtaattagcttagaagctgataagatgattgaagaaggaaaagaactagcgaagattgctccaaacgttgtagtaaaagttccaatgacaacagaaggtttaaaagcagtaaaagcgttctctgatttaggaattcgtacaaacgttacattagtgttctcagcagttcaagcattacttgcagctcgtgctggtgcaacatacgtttcaccattcttaggtcgcttagacgatatcggtcataacggtatggacttaattcgtcaaatcgcagaaatctttgcaattcatggcatcgaaacagaaatcattgcagcatctgtacgtcacagtgttcacgtaactgacgcagcattaaacggtgcacatattgcaacaatcccagcaaacgtaattgcttcattagtgaagcacccattaacagatcaaggaattgagaaattcttagctgattgggaaaaaacacaagagaaataatagaaaagcaagaatcctagtttaattgactaggattctttttttatttaaaagaattttcatgcaattttgcatattgtcttttaaatttgttatataagatatttaatatatatcacataactctttatttttcatatttcgacataaagtgaaactttaatcagtgggggctttgttcatccccccactgattattaattgaaccaagggataaaaagatagagggtctgaccagaaaactggagggcatgattctataacaaaaagcttaatgtttatagaattatgtctttttatatagggagggtagtaaacagagatttcgacaaaaacgcactaatttatctgaattttaagttttataaaaggggagaaatggaatgagaagaaaagcaccatttaaagtgttgtcatcattagcaattgcggcaattatcggatgtacatctgtaatgagtgctccgttagcatatgcagaaacggcagcaaaaaagaaagataatgtatctacaacaccaattgattacaatttaattcaagaagatcgtttagcggaagcacttaaagaaagaggaacaattaatccatcatcttctaaagaagagacgaaaaaagctgttgagcaatatattgaaaagaaacaaggagatcaggcgaataaagaaattcttccagatgctcactcacaagaaacgtctgatttcacaaaaaaagtaaaagagaaaaagatggaagaaaaggaaaatgtaaaaaaggctgaaaaaaatgttagccttgagcaaaagccagaaccaaataaaaatcaattgaatgggcaagttccaacttcaaaagcaaagcaagctccatataagggatctgttcgatcagataaagtattagtgctactcgttgaatttagtgattataaacataataatattgatcaaacaccaggttatatgtattcgaaagactttagtagagaacattatcaaaagatgttgttcggtaatgagccgtatactttatttgatggttcaaaagtaaaaacgtttaaacaatactatgaagagcagtctggtggtagttatacgacagatggatatgtaacggagtggctaactgttccaggaaaagcatctgattatggagctgatggtagcagtgggcacgataataaaggtccgaaaggtgcacgtgatttagtgaaagaagctttgcatgcagctgctgagaaaggactagatttatctcagtttgatcaatttgatagatatgatacaaacggggacgggaatcaaaatgaacctgacggtgtaattgatcatttaatggtaatccatgctggtgttggtcaagaagctggtggcggtaaattaggtgatgatgcgatctggtcacatcgttcaaaattagcagtagatccagtagcgattgaaggtacgaaatcaaaggtagattactttggtggtaaagtagcagcacatgattacacaattgaaccagaagatggagctgtaggtgtgtttgcacatgaatttggacatgatcttggattaccagatgaatatgacacgaaatatactggaaatggttcaccagtcgaagcttggtcattaatgagtggaggtagttggacagggaaaatcgcaggaacagagccgactagtttttcaccacaaaataaagacttcttacaaaagaatatgggtggcaactgggcaaaaatattagaagtagattacgataaaattaagagtggtgtgggagttcctacctatattgatcaaagtgttacgaaatcaaatcgtccaggcgttgtacgtgttaacttaccaggtaaaagtgttgaaacgattaaaccggagtttggaaagcatgcatattatagtacaagaggcgatgatatgcatacaacgttagagacaccattctttgatttaacaaagggaacaaatgcaaaattcgattataaagcaaattatgagttagaagcagagtgcgatttcgtcgaagtacatgcagtaacagaagatggaacgaagacgttaattgatagacttggagaaaaagtagtccaaggagataaagatacaacagatgggaaatggattgataaatcatatgatttaagtcaatttaaaggcaaaaaagtgaaactacaattcgactatattacagatccggctgtaacatataaaggttttgcgatggataatgtaaatgtaactgttgatggacaagttgtattttctgatgatgcagaaggacagtctaaaatgaatttaaatggttttgttgtttctgatgggacagagaagaaagctcattactactacttagaatggagaaactatgcgggatcagataatggattaaaagcaggaaaaggtccagtgtataatacaggtcttgtcgtttggtatgcagatgatagttttaaagataactgggttgggatgcatccaggtgaaggattccttggtgttgttgactctcatccagaagcgctagttggtaatttaaacgggaaaccagcatacggtaatacgggcatgcaaattgcagatgctgcattttcatttgataaaacaccagcatggagtgtaaattcattaacacgtggtcagtttaactattctggattacaaggtgttacaacttttgatgattcaaaagtatatagtaacaagcaaattgcagacgcaggaagaaaagttccaaaccttggacttaaattccaagttgttggacaggcagaagataaatcggcaggtgctgtttggattaaacgttaataacataaaagcacattcttcatatgaagagtgtgctttttaatttgtacagtaagttattattttagtttatgtaatacaagtttttattcatgtgtagtgtatcaaattatgtggggaaaggaaatatttccgaggaaattgtcgaagtatcgtcagtatttataaactttctgtttaaaagaagagatgtattattgcctttacggctcaatttatttacattgttatttggttatacacaaaagtaatatattcggcagtaaaagagcgctattggatagtgttctttttgtagatagaaaggagttgagttaaatgaaagaaataattgaatgtccacagtgtgaaggagagattactgcgcaacatattattgatctcccgcatcctttttcattcagatgtccacactgcaaggtgaggttaaaagaaatgagaatcacaccgtgcttaatattagcagcaatttgtatcattccactgtttattataattggagagagtattaaggaattactagtaaaatatttttctattatagatgatgtaccaactgtacttattttcttcttattttgttatccattgtattatttctatgaaaaatataatgctatattgtttattaaatacggcttattgaaagttaaaagttgaattgaataggagattatcataatgctttggaaaatatatttagttattgtagcaatgttagctattatttcgttagtaaggggcatgtttcaaacaccaattcaaaagtttgactttgtagtttctattattacgtggatagggctctttggttttgtatttgatatacaaatattaacctcaattgtttggaaatgtatcttcttgtttagcgtcatttggactttaactgcagtttttgtttttcgtttatatgaagagcgagatgagccgttaccttttatatttaaagtaattggaattattccaacgcttccattatattacggattatatcaatatgcatttaaaaaaagacaacgatggattatcccatcattgtcttttttactttgcttcttacataaatcatcccagcaaatgttaataaaaatgctgtcccgataatgaagctgatgctaggtgatgctccgattgcgccgactgtaaaggagccagcaacaactcctaatgagaagaaggcataaaataatccgaatgcctttccgcgattatcgtctgtagtattttcaacgagtaaagcgttaatagacgggaagaggattgcgaatccaattccataaatcatcattacgataaagagcataccttttgtagcaaataatccgagtaaagataatgcgaatgccataactgcaattccgattagcattagtttcgaacgattaaatcgatcgtaaatacgatttgttggaagcaagaagaagaggatagcagttataccaaatacacttaacatcatgcctgttgtggatgctttaagcgctaatgcctcaacttttactggtaacatataagtgacaattccttgtgaaaacattaatgtgaaagcaccaatatatgcttgtaataacggttctgattttaaaagttcaaccatatcttctttgttcatcatttgcgttcttgatgtatcttttcttgatacgttatttggtaagaagaatagagatacgatcgtaccaagagccattaaaatagaaatagtaatgaagacccattctacgccagctgttgctttcataataccgctgaaagccggtcctacgattgcggctgttccaacagcagcaccagatagagccattgcttttccttgtttttttgcagttgtttgttttgataaaaatgtaaaggcagcaggaattaaaaagccatcactaaatccatgcataaagcgaacaactaatagttgttcaccactttgaacaacggtgtataacaagactatgaaactcgtaattcccatgcttatataaaggattttttttgcaccaaatttatcgacagctgctccagcaataatattaccgatcatattagcgaatgagtacataccgacaactagcccgataataagaggggttcctccaaggctttgagcgaaagtactcataataggtaattgtgaaaatgtatctaaaaatgccacgataacgataaagtaaataaaatatttcaagcgatattcacctctcctatgctattatggcataatgctaatttcacctgcaatgaaattgaattaacagatgtggaaaaaagtacaaagtgacaaaatattgaacgttatttgtaaaaaattagtagagatgcgattgtttttttgaaatatatggatagaagtattataatagaattgtaaacttcaccaggttaagtatatacatagagagggatgtataaaatgaaagcactactttggcataatcaacgtgatgtacgagtagaagaagtaccagaaccaacagtaaaaccaggaacagtgaaaatcaaagttaaatggtgtggtatttgtgggacagacttgcatgaatatttagcagggcctatttttattccaacagaagaacatccattaacacatgtgaaagcacctgttattttaggtcatgagtttagtggtgaggtaatagagattggtgaaggagttacatctcataaagtgggagaccgcgttgttgtagaaccaatttattcttgtggtaaatgtgaagcttgtaaacatggacattacaatgtttgtgaacaacttgttttccacggtcttggcggagaaggcggcggtttctctgaatatacagtagtaccagaagatatggttcatcacattccagatgaaatgacgtatgaacaaggtgcgcttgtagaaccagcagcagtagcagttcatgcagtacgtcaaagtaaattaaaagaaggggaagctgtagcagtatttggttgcggtccaattggacttcttgttatccaagcagctaaagcagcaggagcgactcctgttattgcagttgaactttctaaagaacgtcaagagttagcgaaattagcaggtgcggattatgtattaaatccagcaactcaagatgtgttagctgaaattcgtaacttaacaaatggtttaggtgtaaatgttagctttgaagtaacaggtgttgaagttgtactacgacaagcgattgaaagtacaagcttcgaaggacaaactgtaattgttagtgtatgggaaaaagacgcaacaattactccaaataacttagtattaaaagaaaaagaagttattggtattttaggataccgtcacatcttcccagctgttattaaattaattagctctggtcaaattcaagcagagaaattaattacgaaaaaaattacagtcgatcaagttgttgaagaaggatttgaagcacttgtaaaagataaaacacaagtgaaaattcttgtttcacctaaataagatagaatcgaatagagtagcccttttctagaaatagaagagggctactttttttctatactgaaaggtgatagactttcctttgactaaatgtatttttgtttggaagggagaatctaatgctttcatttttgttaactttaaagcgaatgttaagagcctgtttacgagcgtggaaagataaagaatttcaagtattattcgtattaacaattttgactttaatatcgggtacgattttttatagtacagttgaagaattacgtcctattgacgctttatattttagtgtggtcacgttgacgactgtcggtgatgggaattttagtccgcaaactgatttcggaaagatatttacaatcttatacatatttattgggattggattagtgtttggatttattcataagttagcagttaatgtacaattgccaagtatattatcgaatagaaaaaaagagtaaagctggtcatctccctgtcaagtagacagaaataaaaagagtattatgccacggccttttcccgatattctatcggggaaaggccttagtttgtctagcatctaaaataaaaattgacgtttcacgttgtttgtttcgttcagttttcaaagaactacttggtcgctcatttgcgacttccttatgttaacattttcgtttttcgatgtcaactaagtttttcaatttctttttgtcgttttctgcgtttccgcatcagcgacggttattaatttaacatatacaaactattaacgtcaacactttttaataaaaaattctttttcttacataacgaatacattcttctgtgttagctactctccggaataaacagaaaatgattttatatctttcttccatggctttttttacaacttcatgaatacgctcatcttcaaaatcaaataaaagttcctctaattctctcttcaatatgtattccatttcttttctctcttcttttgtcaacatcagcccaagcaaacaatcacctcaataattccttacgcaacaataaacgttccgctcattttcaattatcacaatcctatcatccattatatccactacttacgatattaatcctttgttctcttttttatatttacagcatatatgtaactgaaaaggattggacaaaggggcgtaatattatgtttttcttttttattacgagtaagagaaattttaaacacattagcttaatagtgatactgtccttatttacagcatggctactctttttaaaaacatattcacatgaatctgctttttcaactgctacaggccctaaagtaatttacaaaggagacaccgctaaaaagcaagttgcatttacgtttgatattagttggggagacaaaaaagcaattccaatcctagatactcttaaagaaagagaaattaagaatgcaacattcttcctttctgctgcatgggccgaaagacaccccgatattgtagagcgaatcatgaaagacggacacgaaatcggtagtatggggtacaattacacatcctacacttctctagagacaaatgaaataagacgagaccttttacgagcacaagatgtttttacgaaacttggtgtaaaacaagtcaagctgttacgtccacctagtggcgaatttaacaaagcaacccttaaaatcgcagaatcacttggatacaccgtcgtgcattggagtaataattcaaacgattggaaaaacccaggtgtaaataacatcgtttccactgtctctaataatttgaaaggtggagatatcgtcttattacacgcatccgattctgcccttcaaacaaatagagctttaccgctgctcctgcaaaaaataaaaagtgatggatatgagcaaatatccgtatcacaacttatttccaacacaagtacgaaaagtgaagatgtgaagtagcttcttccctaccactcttcacgcataaaaagctctactacctttcaagaaggtggtagagctttttgaatcataccatttccagcattataactgctggtgtataaaatctctctattaagctgatttacttgtttttccgattaaacgatgtaatacaagtaattgatatgcgttacataacaatagcggtataaccattaaatataaccaatctgtatcattaatccgaagcgctggtacccattcaaggatcgttacaacaaccataaagaacagagctggcacaaatgcttttttatttgtttctttgctttttacataagcaacaattgctccaaacacaaataatattccagcaacaagtatgttattccctaacgagacttccccatttgcaataagtacagatcttaaatacacaaaatcaaataatacgaatgcaataaagaagagctggactgcattccataaagaagatgagcggaacatccctagtccaaaacggtggattgttaaatatgcaaagaatcccatttgacttataacactaaaaataaatcctacacccatcagccagaaagatactgctaaaatctccttaccgtcgaaattttgaaaaaattcattgtacttgtcccactccaaaacaaaaccaataataactgtgctaattccaccaagaaacaacgtcgttaaaaatagtcgtacccacttgcggctattcacaacacatcccccattatccttatatttctaattaaattgtatcaatgacaatttcaaaaagctagccatgttcatgtataaattccttaaagatatttatattaaaaagagagaactgtgctgaaaggagttccaacttatgaaacggatgctattcattttcgtttcttcttttctacttatcgcacttgcagcatgcgcacaaggaaaagaaacgaaatccgaactagattacgatcaaacaaagaaaatgattgttgatattttaaaaacagatcaaggtaagaaagctattcaagatgtattaactgatgaaaaaatgaaacaagcactcatactagatgaaacagtagtaaagaaaacgattgaagatgccatggtatccgataaagggcaacaattctgggaaaagctctttaaagatcctgagttctcatcgaagttcgctaaaagtatggggaaagaacaaacccaattaatgaaaaccttattaaaagaccctgaataccaagcaggcgttatagaaattatgaaaaatcctgaagtagaaaaaatgatgttacaaacaatgaagagtaaagaataccgtcaatatctacaacaagtactaacagaaactgctgaaagtccactcttccaagccaagatgattgatatcattagtaaaggtgtgcaaaaagctgaaaaaggcggatctggtaagaaagaagcaggcggtgacggtggttctcaaggcgggaagaaggaagaatagtaaaaaataataactataataacgagtggacaatttatacattgttcactcgttattactttatcttgctattaacagacgaaatggcaccctctagttaagcgaaaggtttactagcaacaaaagccttattgttgtcagtaacaggtgaaccccactgattaaagtttcactttatttttgtgtaacagctgttctatcaattactgtttcagctattttactataaataatgcccgttgtatgtgtatcttcatatactgaaggagcaaagtcttctttattccaatcgggttgttgtagcggaatgcgaccaagaacattcgtttgtaattcggtagctaacttatctcccccgccttttccaaatacatattctttctcaccagttaccttactttcaaaatatgccatattctcaacaacaccaagaatactatgttcagtgcgcaatgccatcgctccagcacgcgctgctacaaacgcagctgttggatgaggcgtcgttacaataatctctttgcaagatggcaacattgagtgcacatctaacgcaacatcacctgtgcctggtggcaaatctagtactaaataatctaaatcgccccattctacttctgtgaagaagtggtttaacattttcccaagcataggtcctctccaaataactggtgcattatcctctacaaagaagcccattgagattacctttacacctaaacgttccaccggaattatcttgtcacctcttacgataggacgtttttctatccccatcatgtctggcacactaaaaccgtaaatgtccgcatcaataataccaactttttttcctaaacgagctaaagcaactgcaaggttaacggaaacagttgattttcccacgccaccttttccactcgctactgctaagaatgttgtttttgaattaggtgacaataaagattcactttgctcttcttcttgttccggtgcaaactgagctaattcctcttctgtaaattctgcaaaacgaagtccaactgttgctgccccaagttcttttactaactttacaattccagactgcaactgcatttgttccgctgtaccggtttttacgattgcaattttgacactcacatgttccttctctggcttgactgttacctctttaattgcacttgtttcttttaatgttttatgtaaaaacggatctacaatcccttctaacgcttcaaccacttgctctttcgttatcataattagcccagccccctgtatgaaaaataacgtaatgttaattgaatttatctctgcttatccttgaaataaatgcgtttacatttccagtataacatattttccgaaaacttcgttaacgagagaagctcaaaaaaatcctccttattctggaggatttcctttttccgtgaaataacgtaatataccacggtatattgcagctgctaccttttgctgatatttctccgaatttaacatatacctttcgttcacattcgataaaaagccagcttcaattaaagcacctggtgttttagaatactttaataaatatacatgcgaaattgtcttagcagaacgattcgtgttttctaaacttgttctcaattcagcctgtataaattttgcagcacgttcattttcaatcgaagagcggtaatagaacgtttgtgcgcctttcgatccactactagttaaagcatttaaatgaatacttgcaaaaaagtctacatcaggtttattgatgatttctacacgtttttttaaatcctctgctttacgtctactatatgactttgtatctttgttagctaaatcataatctccctcacgcgttaaaataactagtgcaccttgttcttgtaaatagtcttgtaccttttttgtaatttcaagcgtaatatccttttctataatatcctttccaccaacagcccctccatctggtccaccatgcccagcatctaatacaattactttccctgataagggtaaattccaagctcgccacgattttgtaatttgaaattcttgtttaactaaaaaaaacaatacaaccgcagcgagtgcaaaagagataattcgaattctcttcatacctttcctcctccagctagtccctctaattacttatatgggacaagaggaaagtttatgcttgtcttaatgaagctttaatcgatatcttctttcacctttttcatacccttcttgccaccacaatcctataaactgctgacaagattcaaaaagtaattcctcatctttcaactttatttctcgcatagtcatactcgttaaaaattgaaatagcgtttcagttaattgttgttcttcttctaaagctctatatttcacatcaaaaaacgattcaccataataaccaaatttactgtatctcgctcctaataaataagattctatccctaattcaatacagtaatcttcatactgacgatgaagctcttgcatttgaaaggcatcacgaatatttgaacgcaatgtttttaatgataattcccgcaacatcttccgctcgtattttaactgcttttctttttgtttttcttgtaagctgacaatgacattcatagtacttataaacctccctaatacgtattagtctaaacttctaaagaagaagcatacgcgtggcggtagcactaaaatattccaagctataaaaattgcaaaagaggaatgaaacataaaaaaaccccaaccaaaatggttggggtttgtagttcgcaaaaattaacgttttgagaactgaggtgcacgacgtgcgcctttaagaccgtattttttacgctctttcatacgtgcgtcacgagttaatagacctgcacgttttagtgttagacggtattctggatcagcttttaataaagcgcgagaaataccgtgacgaatagcaccagcttgaccagtgtatccaccaccatttacgtttacaagtacatcgtagttacctaaagtttctgttgcaactagaggttgtttcactacttcacgtaatgcagcaaatgggatatagttttcaaaatcacgaccgttaatgataacgcgtccttcgcctggaactaggcgtacgcgcgctactgaactcttacgacgtccagtgccatagtattgaacctgtgccaaagtaagccctcctttaattaattatccgcgaagttcgtaaacttctggtttttgtgcttggtgtggatgctctgctccagcatacacgttaagtttcttagaaacttgacggcctaagcgtccttttggaagcatgcctttaattgcaagctctaacatttgtacagggtagtttgtacgcatttcaagagctgttctttgcttaagtccacctgggtggttagtgtgacggtagtaaattttatcgtttaatttattacctgttaaatgaattttctcagcgttaataataattacatgatcacccgtgtcaacgtgtggtgtaaatgtaggtttgtttttaccacgtaaaatggatgctacttcactagcaaggcgacctaaagtttgaccttcagcatcaaccacataccatttacgctcaacttcgttagcttttgccataaaagtcgtacgcatgtgtttccctcctcgttatcttttccatagaaaaaatctattgtttatcttaaacacgatttccttccggggctaatcgtggttttagaaacaataccatatgttatgatatacttttgagtttctaatgtcaagcaaatgttacaccaggattagttgttatagtttacctcccataagtaaagcccatgacctggagccatctttccagcaaactgacgattttgtttcgctaaaatctctggaatgctatcaggatcaagctttccttgccctacgctaagtaacgtaccaacaataattctgaccatattatataaaaatccattacctacaaaacgaaaaattatttcatcattttgttcaattaactcgatttcataaattgttcgcactttatcttttttgtcagtttttgccgaacaaaaagaagtgaaatcatgtgttccaataaaataaggaattgcttttcttatagagttgatttcgagcgggtatggatattgatatacgtaatttctacggaatacatccgcagtctttgataataatacacgataacgatattcttttttctcaacaccgtaacgtgcatgaaattcttctgtttttttctctacttgcctaataacaatatcatctggcaacattgtgtttaaagcattaatccattgccactcttcaagagacaaaggagtatcaaagtgtattacttgtccttttgcatgaactgtagaatctgttctaccagatgcctgaacacgaacaagttctcccttatgcaatttctgcaatgctttttctatctcctgttgaacagtacgatggttcggctgaatttgataaccacaaaaatgcatgccatcatatgcaaccgtacattttattctatccatttctctattctccattacgatcgcacccatgccaaaatacaagctaaacaaaataagctgacaatcgttactgtatcgctttttttccagcgtagttgcctaaatttagtacgtccttcaccactttgatatccacgagcttccatcgcaatggctaagtcctctgcacgcttaaaagcactgataaacagaggaacgagcagtgaaataatagctttcattctatcttttatcggtcccccggcaaaatcaataccacgtgacgcttgtgctttcattattttactcgtttcatccattaatgtcgggataaaacgaagagaaattgacatcattaatgcgatttcatgaacaggaacctttatacgcttcaacggctttaataacgtctccaaaccatctgtaatttcaataggtgtcgtcgttaacgttaataatgtcgtcattaaaataataacgaagaatcgtacagaaatgtatatcccttgctctaatcctttttcatatatcgaaaaccaaccaagctggaatagtacatccccctccttatttgtaaaaatatgcaggaaaaatgtaaaaagaaaaatccataaaattggttttaagcccgaaagtacataacgaatcggcacttttgcaaaaaataaagcaatgagtgcatataaaaataaaaatccatatgaaatcgcattatttgctaagaaaacaacaaatacatataaaaagacaatcagcagcttcgtacgtggatcaagttgatgaataagtgaattccccgggatatatctcccaataatcaactgctgcatgattcatgaccaccttttcgtaacacctgcacaacttcatgagtaagatcctctaaagataaggtagcctttggaattgaaataccaaacttctcttcaattgcacgtttatactttaatgacataggaagatccacaccaattttctctagttcatcggcatgtgaaaatacttcctctgcacttccttgcaaaaagaccgttcctttatgcataactacaatctgctccgcatactgagcagcatcctccatattatgcgttacaaggataactgtaagccccttttccttgtgcagcttataaaacatctccataagttcgttctgcccttttggatctagtcctgctgtaggttcatctaatacaagcacttcaggttccatcgccagtacacccgctatagcaacacgtctcatttgtccaccacttaattcgaacggagaacgtgttaacagttccggttctagccctacaagttcaattgcctttctagccttttgccttgcttcgtctacagatactccaaaattagtagggccgaaacaaatatctttctccacagtctcttcaaacaactgatgttctgggaattgaaagacaacccctacttttttacgtagtggctttaactttttttctttctttcctgccgaaatcaaatgttcaccaatttgaactgtaccatttgtcggctgcaataaaccatttaaatgttgaatcatcgttgacttacctgaaccagtatgaccaataatggcataatagcccccacttggaaacgacacatctacatcataaagtgcgcgtctttcaaatggagttttatattgataacgatgctctactttttggaatgtaatctccaaagttcgttcaccaagctttccattgtaagatgcgtattttgcaagagaatttcatttctttttaataattctgctattttcactgaaaacggtacatctaagccaatttcttggagcatatgagaggatttgaaaattttttctggagtcccttcctctaatatttctcccttatttaaaataatgacacgatctgactgtgccgcttcttctaaatcgtgcgtaatcgataacacggtaatacctttttgagtaacaagttgtctaaccgtttctactacttcacgtctcccttgagggtctagcattgacgttgcttcatctaatattaaaatagatggttgaagtgctaaaacgcctgctattgccactcgctgcttttgcccaccagataaggaatgaggctcatcattaagaaaatcttccatacggacaagtcgcaaggcctgttctaatctttcaatcatttgttctcttggcattccgatattctctaagccaaatacaacatcatcttgcactgttgttccaacaaattgattatctggattttgaaataccattccaatttgttttcgaacatcccataccgtttcctctgataaaaccattgtatcatttactgtaatagtccctgcttctggcaaaaacaaaccattcaataattttgcaagtgtagactttcctgaaccgttttgtccaataatagatacccattctccctcatataaggaaaatgaaacatcttttaatgcataagtggctgccccaggatattgaaatgatatattttctatccgaagtttctcttttttcaatataaggcaccctttccttcgcacagttagcctatttttatatttaaaaaaaagggccatgaccagtttcttgaaaagaactgtcctgcccttttaattatcattatactaactcgataattaccattggtgctgcgtctccgcgacgtggaccaatttttgcaatacgagtgtatccgccttggcgctcagcatagcgtggagctacatcagcgaatagtttttgaagtgcatcttgaccagtctcagcgttagctacttcattgcgaatgaaagctgctgcttgacgacgagcatgaagatctccgcgtttacctaaagtgatcattttttccactacagaacgaagttcttttgcacgagtttctgtcgtttggatgcgctcgttgataattaaatcagtagctaaatcacgtaacatagctttacgttgcgcacttgtacggcctaattttctgtatgccattcgtagttccctcctttgttgatgggtttaaatcctcagtcgtctttacgtaaacctaaacctaattcctcaagtttatgtttaacttcttctaaggatttacgtcctaagttacgaactttcatcatatcttcttctgttttgttcgcaagctcttgtacagtattaattcctgcacgttttaggcaattataagaacgaacagaaaggtctagttcttcgatagtcatctcaagaactttctctttttgatcttcttccttctcgaccataatctcagcattttgtgcttcatcagttaaaccaacaaagatatttaaatgctcagttaagattttggcacctaaagagatagcttcttttggcccgatgcttccatccgtccatacatcaagcgtaagcttatcataattagccacttgtccgacacgtgtcttttccacttggtaagtcacacgtgatactggagtataaatagaatcaataggaattactcctattggttgatcttcgcttttatttgcatcagctggcgtatacccacggccacgctttgcagttaaacgcacgcggaaatgcgcatcttttgctaacgttgcaatgtgtaaatctggatttaagatttctacatcactatcgtgagtaatatcagcagctgtgacaataccttcgccctgtacatcaatttccaacgtcttctcttcttcagagtagattttaagagctaactttttcaagtttaagatgatcgtcgtaacgtcttctactacgccctcaactgttgaaaattcatgtaatacgccatcgatttggatagcagtaacagcggcaccagggagtgaggataaaagaatacgacgtaaggagttacccaaagtagtaccatatccacgctcaagcggttcaattacgaatttaccatatttagcatcttcgttaagttcaaccgtttcgattttcggcttttcgatttcaatcattaactaaaccctccttcaaaacgtcgaaaccccggttaaacaaaggtataacccctgtctaaccgaaagtcccccttaggcagttcccgattgtgcacaacaagcgatgtttctgtacgaaatttctcgataatgcatcatatccattatagacaaaagggaaaattctatacagaaaaattacacacgacgacgttttggtggacgacatccattatgaggaactggagtaacatctctaattgctgttacttctagacctgcagcttgaagagcacgaattgcagcttcacgaccagcaccaggacctttaacagtaacctctaaagtttttaaaccgtgttccattgcagctttagcagcagtttcagcagccatttgcgcagcgaatggagtagatttacgagatccacggaaaccaagtgcaccagcactagaccaagaaagtgcgttaccgtgagtatctgtaagtgttacgattgtgttgttgaaagtagaacgaatatgagctataccagcttcaatattctttttcacacgttttttacgagtgtttgttttacgtgccattgttagttcaacctcctttacttattatttctttttatttgctactgtacgacgtggacctttacgtgtacgagcattgtttttagagttttgaccacgaactggtaaaccacgacggtgacgaagaccacggtaagaaccgatctccattagacgtttgatgttaagagatacttcacgacgaaggtctccctcaactttaatacgatcgatgatatcacggatacgtcctaattcgtcttccgttaaatcacgaactcgtgtttcttcagaaatacctgcttcagcaagaattttttcagcagttgtgcgaccaatgccgaatacgtaagttaaagaaataacaacgcgtttgtctcgaggaatatctacacctgcgatacgtgccattacgaatgcacctccttctgattaaccttgtttttgtttatgtttagggttttcacaaataaccattacttttccacgtctacgaataactttacatttttcgcagattggtttaactgacggtcttactttcatgtctcgaacctccttaaagattacggagtgctatattatttaaaacggtacgtaatacgaccacgatttaaatcgtacggagataattctaccgtaactttgtctcctggtaaaatacgaatgaagttcatacggattttaccagaaacgtgagccaatacgacatgcccattctctaattctactttgaacatagcatttggcaacgtttcaagaacggtaccttcgacttcaattacatcatctttagccattcaatagttctcccttcttcaaatcagtaacattttacactgctctgaaatcccggagagccagctacttataaagtggtaaggatttcgtatcctgcttctgtaagagcaatcgtgtgctcaaaatgggcacaccatttaccatctaccgttaccactgtccagtcatcagatagtgtttttacatatcgtcttccttgattcaccatcggctcaacacagatgaccattcccggctttaatctagggcctctatttggtggaccatagtgcgggatttgagggtcctcatgtaagtcttgcccgattccgtgaccaacatactccctaacgatcgagaatccattctcttcagcatgggtttgaaccgcatgtgagatatttgataatctctcgcctggttttacttgttctagaccaagatacaacgatttttctgtgacatcaagtagcttttgaacagattcagaaatgtttccaactggatacgtccatgcagaatctccatggtacccattgtatttcgcaccaatatcgatactgatgatatcgccctctttgagcttgcgcttccctggaattccgtgtacaagctcttcatttacagaagcacatatgctccccggaaatccgttgtatcctttaaaagatggcgtagcaccatatttttgaatcgtcttttccgctatttgatcgagctctttcgttgtaattcctggagtaatgtgctgtttcaactcttgatgagtcaaagcaacgatcctgccagcttctcgcatgatttctatctcgcgaggagttttgcagattatcattacgctaagcctccgatgagaacatcgatatcagcaaatactttattgatatcttgctcaccattaatgctttgtaagtaaccaagctcttcgtagaaatcaagcaaaggttttgtttgcttaatatttacatctaaacgatttgctacagtttcttcattgtcatcagagcgttgatataattcgccaccacatttatcgcacacatcagcttttgctggtggattgaattctaagtggtaagtcgcaccgcactctttacaaatgcgacggcctgtaaggcgttttaataacaaccctgaatccacattaatgtttaaaacatagtcgatttttttgccaagatctttcataatttcttcaagagctgatgcttgtgcaacagttcgtgggaaaccgtctagtaagaaacctcttacgcagtcgtcttgacttaaacgttcacgaacgattccgatcgtaacttcatctggaacaagtgcacctttatcaataaaagattttgcttgtagacccatttcagtttcagccttcatagctgcacggaacatgtctcctgttgaaatgtgagggatgttatacttggcaacaatctgttcggcttgtgtacctttaccagcaccaggaagccccattaaaattaagttcatccttgttccccctcagagtacatgagcatgtagggaagacaattcttcccacttactcactgcttgataaaccctttgtaatggcgttttaccagttggctttctagctgcttcattgtttctaaagcaacgccgacaacgattaacatactcgttccaccgatctgtgcagatggaggaagatttcccaatttcgtaaagataactggtaagattgcaatcgctgctaggaaaattgatcctacaaaggtcaaacgatacaagatttttgttagatattgttccgtattcttacccggacgaatacctggaacatatccaccttgcttgtttagattctctgacatttgctctggattaacctgaacaaatgcatagaaatatgtgaaggctacaatgagcgcaacatatatgatcattcccactgggtgagaatagttaaagtttgcaataatccactgcgatacatcatgtttcgggaagaactgtgcaatagtcggaggcgtaattaagaatgaaacagcaaaaattactggaataacaccagcactattcaccttaagcggtaaatgtgtgttttgtgctccagcataaccaccatttcctcctgttacacgcttcgcatattgaattgggatctttctaacagcctgttgaatgaaaataacacccacaataactgctagcacagctagtaaaatcaatgcaactttaacgatactcatgaacaattgatctccgatattttgaaactgttgctgatacacttgagatataacacttgggatcgctgcggcaataccgccaaagataaggatggaaataccattacctacacctttagctgtaatctgttcacctaaccacattaaaaatgcagtaccagcagtcagtaccgtagcaatgtataaataagtgctccaacctggattcaaaattaattgtccacctaccataccgttaaaaccgattgacataccaaacccctgaataaacgcaagaacaattgtaaagtaacgcgtgaattgcgttaatttacgacggcccatttcaccttgcttcgaccattccgaaaatttaggaacaacatccatctgcaataattgcacgatgatggatgctgtaatatacggcatgattcccatcgcaaagatggagaagtttttcaaggctccaccgccaaatgtatttagaatacctaaagcatttaattgatcttgtgccttcagtacgtctccatttgtaaatggcacggggataaacgtgccaatcctgaatacgattaacatcgctaaagtgaataatattttacgtcttatctcagcaacgcgcataaagttggagattgtacgaaacattagatcacctcaactgatccgccagctgcttcaattgcttctttagcacttgaagagaacttgtgcgctttaacagttagttttttctctactgctccgcttgcaagaactttaacaccgtcgtttaacttgctgataacgccagtttccagcaataattcaggtgttacttctgtaccatcttcaaaacgatttaacgttgataagtttacaatagcaaactctttacggttaatgtttgtgaagccgcgtttgggtaaacgacggaataatggagtttgaccaccttcgaagccaagacgaacaccgccgccagaacgtgcgttttgtcctttatgacctttaccagcagttttaccgttaccagaaccgataccacgaccgacacggttacgtactttacgagaaccttctgcaggttttaattcatgaagtttcattcccaggcacctccttatattaatgagttatccttaagcttcttttacagttacaaggtgagaaactttgttgatcataccaagaatagcaggagtttcttccttaactacagttgaattcaactttttaagacctaaagcttctaccgtcgcacgttgatcttgtggacgaccaattacactacgagtgagggtaatttctaactttttcgccatttgttttccctccttaacctagtagctcttctacagatttaccgcgtaattttgcaacatcttcagcgcgcttaagttcgcttaatccgttcacagtagcgcgaatcatgttgattggtgtgttagaaccaagagatttcgaaagaatatcttgtacaccagctaattcaaggaccgcacgaacaggtccaccagcaataacaccagtaccctcagcagcaggttttaagaatacttcaccagcgccaaaatgaccgttgattgtgtgtggaattgttgtaccaactaatggtacagcgattaagtttttcttagcgtcttcgatagctttacggattgcgtctggtacctcttgtgctttaccagtaccgaatccaacatgaccgtttttatcgccaactacaactagtgcagcaaagcggaaacgacgaccacccttaacaactttcgcgacacgatttatcgtaactacacgttcttcaagttctaatttacttgggtcaatgcgatgcatcaattttccctcctttgaccattaaaattgtaatccagcctcacgagcagcttcagctagagctttaacacggccatggtataagtaaccaccgcgatcaaatactacttctttaacgcctttctctacagcacgcttagcaactgattctccaactttcgtagcagcttcaatattgctagtaccgttaagagcaaggtctttatcaagagtagatgcacttactaacgttacaccattcacatcatcaataacttgagcgtaaatatgttggttagaacggaacacgtttaaacgtggacgctctgcagtaccagtaagtttagcacgtacacgtgcatgtcttttcttacgagtcgcatttttatcagctttagtgatcattcttgtcactcctttctctcacctaacgggtttacttagcagttttaccttctttacgacgaacaacttcgccttcgtaacgaatacctttacctttgtaaggctcaggagcacgtacagcacggatgttagcagcgaattcgccaacacgttgcttgtcgatacctttaattacgatcttagttggtgcaggtacttcaacttcaagacctgcttccggagtcatttctactggatgagaataacctacgcttaatacaagtttatcaccttgtttttgagcacggtaaccaacaccgactaattcaagtccgcgtgcgaaaccttcagttacaccttcaaccatgtttccgattaaagcacgagttgtaccgtgtaatgcacggtgttccttctgttcagatggacgctcaactgttaatgtattctcttcaattttgataagcatatcagcattgaaagtacgagttaattcacctttagggccttttactgttacagtattgtcttctgcaactgtaatagtaacacctgcagggatttcaagaatctttttaccaatacgagacatgtggtcacacctccgttcgttttaaatatatattaccaaacgtatgctactacttctccaccagtttgtaattgacgagcgtctttgtctgtcattactcccttagatgtagaaacaagagcgatacctaatccgttaagtacacgtggtacttcgtcagctttagcgtaaacgcgtaagccaggtttactgatacgttttaatccagtgattacacgttcattgtttgcaccatatttcaggaaaatacgaaggataccttgtttgttatcctcgatgtattctacatcacgaatgaaaccttcacgttttaaaagttcagcgatctcttttttgattttagaagcaggaacctctaatttctcatgacgtaccatgttcgcattacggatgcgagtaagcatgtctgcaattggatctgtcatcaccatgtgttttacctccttcccatttgtgggttttaccaactagcttttttaacaccaggaatttgacctttatatgcaagttcacggaaacaaatacggcaaagtttaaatttgcggtatacagaatgcggacgaccgcagcgttcgcaacgtgtatactcttgtactttaaacttaggagtacgcttttgtttcgctatcatagattttttagccacgttttcgcctcctctacttagcgttggcttccattatttttggaatggcataccgaattgtgttaaaagttcacgagcttcttcatcagttttcgctgtagtaacgattacgatgtccataccgcggactttgcttactttatcataatcaatctcagggaaaataagttgctctttaacacctaatgtatagtttccacgaccatcgaatgatttcttagaaacaccacggaaatcacgtacacgtggtaaagaaactgatactaatttgtcgaagaactcatacatttgctcgccgcgtaaagttactttcgcaccgattggcataccttcacgaagacggaaaccagcgattgattttttagcacgagttacaacaggtttttgacctgtgatttgtgttaattcttctactgcgttgtctaacgcttttgagttagataccgcgtcaccaacaccagtgttgattacgatcttttcgatttttggtacctgcattacagatttatagttaaacttgctcactagagcaggagtaatttccttttggaacttctctttaaggcgattcaatgaagtgacctcctttcttaagaaaattatttatctaataattcaccagatttttttgcaatacgaacttttttaccatcttctactttgaagcctacacgagtaggttcacctgttttcggatctaaaatcataacgttagaaacgtgaataggtgcttctttagtaataattccaccttgtggatttaattgagatggcttagagtgcttcttaacgatattgacaccctcaacgataacacggttttgctttgggaaagccacaaggataacgccttgttttcctttgtctttaccagtgattacctgtactttatcacctttttttacatgcatcttaattctgcacctccttagcaaggcaataccttaaattatagaacttctggagctaaagaaacgatcttcatgaagttgctatcacgtaattcacgagctactggtccgaagatacgagtaccacgtgggctcttatcgtctttaatgataaccgctgcgttttcatcaaatttgatgtaagaaccgtccggacgacgagctccgctcttcgtacgtaccactactgctttaacaacgtcaccttttttaacaacgccacctggtgttgcttgttttaccgtagcaacgataatgtcaccaatgttagcatatttacgaccagagccgcctaatactttaattgttaaaagttcacgtgcaccagagttgtcagcaactttcaaacgagattcttgttggatcatgttatgaaacctcccttcggactaaaaattccgattcgtctatttagataataaccgcttcttcaacgatttcaactaaacggaaacgcttagtagcagaaagcgggcgagtttccatgattttaacgatatcgccaagtttcgcttggttttgctcatcatgggctttgtacttcttagaatacttaacacgttttccgtacaaggaatgagttttgtaagtttcaactaaaactgtaatcgttttgtccattttgtcagacactacacgaccagtataaactttgcgttggttacgttcgctcactatgcaaacctcccctcaatttatcgattaattccgatctctctttcacgaactacagttttcatacgagcaattgctttacgcacttcacgaatgcgagttggattctctaattgtcctgtagcaagttggaagcgaagattaaacaactcttcctttaaagctttaacttttgtttcgatttcggcagtggttaattcacgaatatcattagttttcattagattcaccaccattttcttcacgttttacgaatttacatttcacaggtaacttgtgagctgcaagacgtaatgcttcgcgtgctacctcttcagatacacccgcgatttcaaacataattttcccaggttttactactgctacccagccttctggtgcccctttaccggaacccatacgtacttctagaggttttgcagtgtaaggtttagaagggaaaattttaatccatactttaccgccacgtttcatgtaacgagtcattgcacgacgagcagcttcgatttgacggtttgtaatccatgaagcagcttgtgcttgtaaaccgaattcaccgaaagcaatttcagttccacctttagcacgaccacgcattttaccacgatgctctctacgatattttacgcgttttggcattaacatattattttcctccttcctcagaagctttcttttttgtaggaaggacttctccacggtagatccatacttttacgcctaatttaccgtatgttgtatcagcttcaactgctgcatagtcaatatcagcgcgaagtgtatgaagtggaacagttccttcactgtaagattctgcacgagcgatatcagctccgccaagacgaccagaaacctgtgttttaatacctttagcacctgcacgcatagcacgttgaataacttgcttttgtgcacgacggaatgatacacggttttctaattgacgagcgatgttttcgcctactaatttagcgttaagatcagctctcttaacttctaaaatgttgatgtgtacacgcttgcctgttaattggttaagagctttacgaagtgcttcaacttcagtaccacctttaccaattaccataccaggttttgcagtgtgaattgtaacatttacacgatttgctgcacgttcgatttctactttagcaacagcagaatcttttaagcgtacattaatgtactcacggattttgatgtcttcatgtaataatgtagcgtaatctttctcagcgaaccaacgagattcccagtcacggataacgccgacacgaagaccaattggattaaccttttgacccatcgattatccctccttcttttctgataccacaactgtgatgtggcttgtgcgtttgttaatttggcttgcacgacccattgcacgtggacggaaacgttttaacgttggaccttcgtcaacgaaaactttttcaacaactaggttgttaatgtccatctcataattgtgctctgcatttgcgattgcagattttaaaactttttctacaactggagaagcagtttttggtgtgtggttaaggatagcaatcgcttcacccacttgcttacctcggattaagtctactactaaacgaactttacgaggagcaatacgaactgttctcgctactgctttagcttgcattgaagtgcctcctctcattatcttctagttttcttatcgtcagcaaggtgacctttgtacgtacgagttggtgcgaattcacctaacttatggccaaccatatcctcagtgatgtacacaggtacgtgtttacgaccatcatatacagcgattgtgtgtccgatgaactgagggaagattgttgaacggcgagaccaagttttaacaacttgtttttgctcagatgcaactaatttttccattttgctcattaagtgatcatcgacaaatggtcctttttttaagctacgagccattttggtgcctcccttcgtgattggcgtacggttctagaaatgaaccgtactacaatcccattattttttacgacgacgaacgatgaatttgtcagacgctttgtttttcttacgagtcttgaatccaagagttggtttaccccatggagacattggagacttacgtccgattggagaacgtccttcaccaccaccgtgtgggtgatcaaccgggttcattacagaaccacgaactgttgggcgtttacctaaccagcgagagcgacctgctttaccgattttgataagttcgtgttgttcgttacctacttgaccgattgaagcgcgacaagcagataatacaagacgtacttcaccagaagttaaacgtacaagtacgtatttaccttctttaccaagtacttgagcagatgtaccagcagaacgaactaattgtccgccacgaccaggcttaagctcgatgttatgaacaacagtacctactggaatgttgattaatggtaatgcgttaccgattttaatgtcagcttctgggccagacataacttccatacctacttctaaagatttaggagcaagaatgtaacgtttttcaccgtcaacgtagttaattaatgcgatattcgcagagcggtttggatcgtattcgatcgtagcaacgcgtcctggaattccatctttgttacgcttaaagtcgatgatacggtattgacgcttatgtccgccaccttgatgacgtacagtgattttaccttggttattacgaccagccttcttgcttaaaggagcaagtaatgacttttcgggtctatcagtcgtgatttcagcgaaatcattcgtagtcatattacgacgaccgttagtagttggattatactttttgattcccatctcaatttccctccttctttagtaagaattaaacgccttggaagatttcgatttctttgctgtcagcagttagcttaacgattgctttacgacgacggctagtaaaaccagcgtgacgaccaacgcgttttgctttcggcttgtagttcatgatgttcactttttctactttaacaccaaagatcgcttcaagagcatctttaacttctgttttattagatttaacgtccacatcgaacgtgtattttttttcagccatcatttccatagaacgttcagtgataactgggcgcttaatgatatcacgaggatctctcattatgcaagcacctcctctactttttccactgccgcttttgtcatgattagcttatcatgatgaagcacgtctaaaacgtttacgccatcagcagtgattactgttactccagggatattgcgagcagataactctacagattcgtttgcatcagcagttacgataagagctttcttctcaacagttaatcctttaagtactgctagcatatcttttgtttttggtgcatttaacactaggtcttcaagaactacaatgttgttctcaactactttagtagctaatgcagatttgattgctaaacgacgaactttcttaggaagtttgtacgcatagcttcttggtgtaggtccgaataccgtaccaccaccacgccattgaggagagcggatagacccttgacgagcacgtccagttcctttttgacgccatggtttacgaccaccaccgcgaacttcagagcgagtttttactttgtgtgtaccttgacgtaaagatgcacgttgcatcattacagcttcgaaaagtacagcttcatttggttcgataccgaaaatagcttcagctaattcgatttcaccaacctgtgaaccagtttggttatatacagtaacttttggcattggaattcctccttcctattgtgaattatttgctaaccttcacagcgccttgaacaactacaagagatttcttagcacctggaacgttaccttttactagtaataagttgcgctcagtgtcaacttgaacgatttctaagttttggatagtaacttggtctccacccatacgtccagcaagttttttgcctttgaatacacggttcggagcaactgggcccattgaacctggacgacggtgatagcgagaaccatgagacataggtccgcgagattgtccgtggcgtttgataacaccttggaaacctttacctttagaaattcctgttacatcaacgatttcacctgtagcgaatacgtcaacttttacctcttgaccaacctctaatccgtccacgtctgcatcgcggatttcgcgaatgaagcgcttaggagttgtagatgctttagcagtgtggccttgttcaggtttgttagttaacttttcacgtttatcttcaaatcctaactgaattgcattgtagccatcagtttcagttgttttcttttgaagaacaacgtttggattagcagcgataactgttactgggattaactcaccgttctcagcaaatacttgagtcataccgatctttcttcctaagattcctttggtcatgagttacacctcctacatttttaagttatataaattatagtttgatttcgatatctacaccagatggtaagtctaaacgcattaatgaatctactgtttgtggagtaggactcacgatgtcgattagacgtttgtgcgtgcgcatttcgaattgctcacgagaatctttgtacttatgaacagcacgaagaattgtgtaaacagttttttcagttggtaatgggatcggaccagaaactgttgccccagaacgcttagctgtttctacaattttctcagctgactgatcaagaatacggtgatcgtaagcttttaaacggatacgaattttttcttttgccattattttccctccttcgttcgcctatttctaaaatagaccttctccatggaaatttccccacaccatgccatggcaaagcggccgggtgtgtcagcaaccttccacttcatcgcagtcaaagaccaacattgtctattatacaatgttattcgtctagatgcaagcatctttttgtttgcatctgcttttctctacttttgctattatacatggcactttaaagaatttcaagttttcatctaacagaattcattttacagtttctggattatcttttattgtttttatattactatagaagaaactcgtcaaaacaaaaaaacactctcttatcccttatataaacgcaaacaaaaaacctaagggaaaatcccttaggtttttttatatcagttaagattactcaacgatagtagcaactacaccgtaacctactgtacgtccaccttcacgaatagagaatttagttccctcttcgatagcgattggagcgataagttcgatagtcatttcgatgttgtcaccaggcattaccatttcagtaccttctggtaattggatgataccagttacgtcagttgtacggaagtagaactgaggacggtagttagcgaagaatggagtgtgacgtccaccttcttctttagataatacgaaaacttcagctttgaatttagcgtgagcttttacagaaccgctttttgcaagtacttgtccacgttggatgtcttcacgagcaaccccacgaagtaaagcaccgatgttgtctccagcttgagcttggtcaagaagtttacggaacatctctacaccagttacagttgtagaagcattttcttcagcaagaccgatgatttctactacgtcaccaactttaacgataccgcgctcaacacgaccagtagcaactgtaccacgacctgtgatagagaatacgtcctctacaggcattaagaatggtttgtcagtttcacgttctggagttgggatgtaagcatcaacttcagccattaattcaatgatttttgcttcccaatcagcttctccttgaagagctttaagagcagaacctttgattacaggaatgtcgtcgcctgggaatccgtattcagataataggtcgcgaacttccatttctactaattctaataattcttcgtcatctaccatgtcgcatttgtttaagaatacaacgatgtaaggaacacctacttgacgagaaagaaggatgtgctcacgtgtttgaggcattgggccatcagcagcagatactactaagataccgccgtccatttgagcagcaccagtgatcatgtttttaacatagtcagcgtgacctgggcagtcaacgtgtgcatagtgacgagtttcagtttcgtactcaacgtgtgcagttgagattgtgataccgcgctctctttcttctggagcagcatcgatttgatcgtatccgcgtgcttcagcaccaccagcttttgcaagaactgtagtgatcgcagcagttaatgtagttttaccatggtcaacgtggccgattgtaccgatgttaacatggggtttagaacgttcgaatttagctttagccattctaaattcctccttagtttatataggttattttatatttagactagaaagtgaaacttacgtcccactttctaagcttacataagtagttatacttgaacaatcgataaaaatcaattattcacctttattttttttgataatttcttcagaaacagactttggtacttcttcatagtggtcaaacaccatagagaatgttccgcgtccttgagtgttagaacgtaatgacgttgcataaccgaacatttcagaaagtggaaccatagcgcgaacaacttgtgcgttaccgcgagcttccataccttctacacgtccacgacgagatgttacgtcacccataatgtcacccatgtactcttcaggaattacaacttcaactttcatcattggctcaagaattactgggctacatttagaaaccgcagctttaagtgccatagatgcagcgattttgaacgccatctcagatgaatcgacatcatggtaagatccgtcaactaatgcagctttaatgtcaactagtggataaccagctagtacaccatttttaagtgcatcttcaagacctgctccaacagctgggatgtattcacgaggaactacaccaccgacgatcttgttttcgaattcgaatcctttaccttcttcgttaggttcaaactcaatccaaacgtgaccgaattgtccacgaccaccagattgacgagcgaacttaccttcaactttcgcagcagcgcggaaagtctcacggtatgctacctgaggagcaccaacgtttgcttccactttgaattcacgacgcatacggtcaacgatgatatcaaggtgaagttcacccataccagcgatgatagtttggccagtttcttggtcagtgtgagcacggaatgttggatcttcttcagaaagcttagataatgctgtacccattttatcttggtcagctttagattttggttcgatagctacagagataactggctctgggaattccatagactcaaggataacaaggctcttctcgtcacaaagagtatcaccagtagtagtatcttttaaacctacagcagcagcgatatcaccagcgtaaactgttgaaatctcttcacggctgttagcgtgcatttgtaggatacgacctacacgctcacgcttacctttagttgagtttttcacgtatgatccagagtttaacacaccagagtacacacggaagaacgttaacttaccaacataagggtcagtcatgattttgaatgctaaagctgcgaatggttcttcatcgctagacttacgttctacttcttcatctgtatccggtagagtacctttaatagcaggtacatctagtggagatggaaggtagtcgataactgcgtctaacagaatttgaacacctttgtttttgaatgcagaaccacagattactgggaagaattctacagaagttgtagccttacggataccagctttaagctcttctacagtgatttcttcaccttctaggtacttcatcatcatttcttcatcaagctcagctaccgcttcaataagttttccacggtattcttcagctaattctttgtgctcttcaggaatttcaacacgttgaatgtctgttcctaaatcgttaccgtacatgtaagcacactcttcaacaaggtcaatgataccattgaactcatcttcagcaccgattggtaactgaattggatgtgcgtttgcttgtaaacgatcgtggattgttcctacagagtataagaaatctgcaccgatcttatccattttgttaacgaatacgatacgaggtacgccgtaagtagtagcctgacgccaaacagtttctgtttgtggttctacaccagattgcgcatcaagtactgctacagcgccatcaagtacgcgtaaagaacgttctacttctactgtgaaatctacgtgtcctggagtatcaatgatgtttacacgatgacctttccattgtgctgtagttgcagcagaagtaattgtgataccacgctcttgctcttgctccatccagtccatctgagatgcaccttcgtgagtttcaccgattttatgaatacgtcctgtgtagtacagaatacgctcagttgctgttgttttaccagcatcgatgtgagccatgataccaatattacgagtgttttctaaagagaactctcttgccatttggtgtcttgctccttccatatatggattggatttttttattttaagtagcaaaaaagccactttatattgttacacatgtcagtatgtccagtactctcattatgtaaaacgagcgcccgatgaaagggagaggcattctccctctccacacttccataagcgacaaataaagcggtttatgcttacatttattttacgttgaatcctaccaacggtaatgagcaaatgctttgttagcttctgccattttatgagtgtcttcacgtttcttaacagatgcaccagcgttgttagctgcatctaagatttcgttagcaagacgctcttccatagttttttcaccacgaagacgagcgtagtttactaaccaacgaagacctaaagttgtacggcgttctggacgaacctcaactggaacttggtagttagcaccaccaacacgacgagcgcgtacttcaagaacaggcatgatgttcttaagagcttgctcgaatacttccattggctctttaccagtacgttcgtttacgatatcgaacgcattataaagaattgtttgagatttaccttttttaccgtcaaccatcattttgttgataaggcgtgttactagcttcgaattgtacattggatctggtaacacgtcacgtttcgcaacaggtcctttacgaggcatattgagttcctcctttcattttaaagttattattttttagcaggttttggtctcttagtaccatatttagaacgtccttgcatacgtttgtcaacaccagctgtgtcaagcgcaccacgaacgatgtggtaacgtacccccggtaaatcctttacacgaccaccgcgaattaatactacgctatgctcttgtaggttatgaccgatacctgggatgtaagctgtaacctcgataccgtttgttaaacgtacacgagcgtatttacgtaacgctgagttaggtttctttggagtcattgtaccaacacgagtacatacaccacgtttttgaggtgcagagatatcagttgattttttctttaaagagttaaaacctttgtttaacgcaggtgatttagatttccatactttatcagtacgaccatttctcactaattggttaatagtaggcatttgattatcctcccttcgcatgtttgtatgaccacatatccaggtggttcattattagttgaaaacaaagtttttgcaaggaagagcaaatgctctctcctcacaaaaacagttttaacttattattcctattgctgaagctcccacttgaatccccgaagctttaccaagcttacgaactgattcaacttttgttatgggcacgttatattgcattgcaacacgaatgatagcatgggttaaccgcatgtcagcatcctctgcgatgacaacttctttaactgtaccatttttgattgcctccaatgtgcgtttatgaccaacgactacattttcagcagttgatactttttgataagacatataaatatcctccaaagcatcgttcaggagcaaccttgattatagtaacattttgactcatacaatgtcaactaagattaattgtttttatacaaaatttatgccggaaaattttactgttccacataaacctcatcgttttctacattcatgtcatcttgtgttgtttttacaagatccactttgcgataacgattcatacctgttccagcaggaacaagtttaccgataataacattttcttttaatcctagaagttcatcgcgtttacccttaattgctgcatcagttaagacacgagttgtttcttggaacgatgctgcagataagaatgaatctgtttcaagtgaagcttttgtaataccaagtagaacaggtctagctgttgctggttgcttaccttgcagtaagaccttagcattcgcatcagtgaactgatggatatctagtaatgttcctggtaatacatctgtttcacctgcatcacttacacgaactttacgtaacatttgacgtaccattacttctacgtgtttgtcaccaatttctaccccttgcatacggtatactttttgaacttcacgtaataagtattcttgaaccgccgtaatgtccgttacttttagtaattctttcggatcaatagaaccttctgttaactctttaccgtggctaattggctgtcctggagttactttcagacgagcaccgtaaggaatagcatacgtacgagcttcaacttcaccctgtacaactacttcttggcgatctttaacgtcgttgatcgctgcgataacaccgtcgatttcactgataactgcctgacctttcggattacgagcttcgaagatctcttggatacgaggtaaaccttgagtgatatcatctccggcaaccccacctgtatggaatgtacgcatcgttaactgtgtacctggctcaccgatagattgagctgcgataatacctaccgcttctcctacttctacgtctgttccagttgctaagttacgaccgtaacacttcttacatacaccgtggcgagtgttacacgtaaacgctgaacgaatgtttacagtttcaacacccgaattttcaacgatatgagcgatatcttcagtaattaattgattttcagcaactaatacttcacctgtttcaggatgttttacagtttttcttgcaaaacgtccaacaagacgatcatataatgactcgataacttcattaccctctttaatcgcaccgattaataaaccgcgatctgttccacaatcatcttcacgaacgattacatcttgtgcaacgtcaacaagacgacgtgttaagtaaccagaatcggcagttttaagtgctgtatcagcaagacctttacgcgcaccgtgcgtagagatgaagtactcaagtactgttaaaccttcacggaaactcgatttgattggaagttcgatgatacgaccagatggattggccataagaccacgcataccagcaagctgagtaaagttagatgcgttaccacgggcacctgagtcactcatcatgaagattgggttgcgtttattcaaggatttcatcagttttccttggataacatcttttgcattactccaaatagagataacgcgatcgtaacgttcttcttccgtgattaaaccgcgacggaattgtttaattacattatctacttttgcttgtgcttcgtggagaatttcatctttttcgcctaatacaagaatgtcagataccccaactgtaataccagcttttgtagagtacttgaatcctaagtttttcatacggtcaagcatgcgagacgtttctgtaatttggaaacgtttgaatacttccgcaatgatgttaccaaggattttcttgctaaatggcgccacttcttcgcgactagcaataatttctttaatgttcgcacctttttcaacaaaatatttcgctggtgtttctttttcaaggtttgaatttgttggttcattaatataagggaacgactctggtaagatttcgttaaatattaatttaccaactgttgttaatagaagcatactcttttgctcttcagtaaatgttgcgttgtttactgcacttgcagctactgcaacacgtgtatgaagatgaacatatccattttgatatgcaagcaatgcttcgtttgcatctttgaagaccataccttcaccgattgcaccttcacgctcaagtgttaagtaatagttacctaataccatatcctgagatggagtaacaactggtttaccgtctttcgggttcaagatgttttgtgccgctaacataagaagacgagcttcagcttgagcttctgatgataaaggtacgtgaacggccatttggtcaccgtcaaagtccgcgttgtatgcagtacatacaagtgggtgaagacggattgcgcgaccttctactaatgtaggttcaaacgcctggataccaagacggtgaagtgttggtgcgcggtttagaagtactggatgttctttaatcacagactctaaaacgtcccaaacttcaggttgtacacgctcgattttacgtttcgcactcttaatgttatgtgctaatcctttttcaactaactctttcattacgaaaggtttgaacagttcaagcgccatttcttttggtaatccacattgatacatctttaagttcggtcctacaacgattacagaacgaccagagtagtcaacacgtttacctaataagttttgacggaaacgtccttgtttacctttaagcatgtgagatagtgattttaatggacggttacctggtccagtaactggacggccacgacgaccattatcgattaatgcgtctacagcttcttgtaacatacgtttttcgttttgaacgatgatgcttggtgcacctaagtccaatagacgttttaaacgattgttacggttaattacacgacggtataagtcgtttaagtcagaagtagcaaaacgtccaccgtctaactgtaccattgggcgtagttctggcggaattactggtagaacatctaagatcatccaagacggttcatttccagagttacggaatgcttctaatacttctagacgtttaatagcacgagtacggcgttgtccttgtgctgtttttaattcttcttttaagaagtctacttctttatctaaatcgatgtcttgtagtagctttttaattgcttctgcacccatagcagcttggaatgtgctaccatatcgatcacgatatgcacggtattctttttcagaaagtaattgcttcttatcaagtggtgtatctccactttctgttacaacataagaagcgaaataaattacttcttcaagcgcgcgaggggacatgtctaagacaagtcccatgcggctcgggatacctttgaaataccaaatatgagatacaggagcagctaattcgatatgacccatacgttcacgacgtacttttgcacgcgttacttcaacgccacatcgatcacaaactacacctttataacgtacacgtttgtattttccgcaatgacattcccagtccttttgtggtccgaaaatacgctcacagaacaagccatctttttcaggctttaacgtacgatagttaatagtttctggtttcttaacttcaccgtatgaccaagaacgaatcttgtcaggtgaagcaagtccaatcttcatatattcaaagttatttacatctatcaaggggcctacctcccttttagtctacaggttatcccaattattccttagttgtctcaacttcgacattcaatttatctgctgattgatgatcatcgtcatcttctgtatcacgcatttcaatttctgtatcgtcgctagacatcattttaacgtccatacctaaactttgcagctctttaatcaatactttgaatgattcaggaacgcctggttctggaacattttcgcctttaacaattgcttcataagtcttaacacgtccaacaacatcatcagacttcactgttaagatttcttgaagagtataagcagcaccgtaagcttcaagtgcccaaacctccatctcaccgaaacgctgtccaccgaactgagctttacctccaagaggttgctgcgttacaagtgagtatggtccagtagaacgagcatgaagtttatcgtcaaccatgtgcgcaagtttaatcatatacatgacaccaacagatacgcggttatcgaatggttcaccagtacgtccgtcatacaggattgttttcgcgtcatttgccataccagcttcttcaattgtgccccaaacatcttcctcacgagcaccatcgaatactggtgttgcaatgtgaatgccaaggtatcttgctgccataccaagatgaagctctaatacctgaccgatattcatacgagatggtacccctaatgggtttaacatgatatcgattggcgtaccgtctggtaagtaaggcatatcttcttctggtaaaatacgagaaataacacctttgttaccgtgacgtccggccatcttgtcaccttcagaaattttacgtttttgaacgatatatgcacgtacaagttgattcacgcctggtggcaattcatcgccatcttcacggttgaatacttttacgtctaagataataccgccaccaccgtgtggtacacgtagtgatgtatcacgtacttcacgcgctttttctccaaagatagcatgtaatagacgttcttcagctgttaattctgttacacctttaggtgttactttaccaacaagtaaatctccatcttttacttcagcaccaacgcgaatgataccgcgctcgtcaaggttacgtaatgcgtcttccccaacgtttggaatgtcacgtgtaatttcttctggtccaagtttcgtatcacgagcttctgattcatattcttcaatatgaatagaagtgtacacatcatcttttacaaggcgctcactcatgatgatcgcatcctcgtagttataaccgtcccaagtcatgaagccaacaagcacgttacgtccaagtgctagttcacctaattccatagaaggaccatccgcaaggatttcaccttttacaacttcatttccaacacttacgattggacgttggttgtaacaagttccttggttagaacgaatgaatttttgcattttgtagcgatctaagtcgccttttactgtttgaccgtcaacttctacatagcgacgtacccaaacttcacgtgcttctacgcgctcaacaacaccaggatgtttacagattactgcagcacctgagtcttttgctgatacgtactccatacctgtacctacaatcggagattccggattcattaacggaaccgcctgacgttgcatgttcgctcccataagtgcgcggttagagtcatcgttttctaagaacggaatacaagctgtcgctgccgacactacttgttttggagatacatccatgtagtcgatgcgttctctatttgtgacaatgttttcaccacggaaacgagctacgatatcttcacttaggaattcaccttcgtcagataatttcatattcgcttgggctacaacataattatcttcttcatctgctgttaagtaatcaacatgccctgttacaagaccagtttctgggtcaacacgacggtatggtgtttcaatgaaaccaaactcatttactttcgcgaacgaagataatgagttaatcaaaccgatgtttggtccctctggtgtttcaatcggacacatacgaccgtagtgagagtaatgaacgtcacgcacttcaaagcctgcgcgctcacgcgttaaaccaccaggtcctaatgcagatagtcttcgtttgtgagttaactctgctaatggatttgtttggtccataaactgagataactgagaacttccgaagaactctttaatagatgcaataacaggacgaatattaattagtgcctgtggtgtaatcgcatttgtatcttggatcgacattctctcacgaacaacacgttccatacgagaaagaccgatacggaattgattttgtaatagttctccaacagaacgcagacgacggtttcctaaatggtcaatatcatctgtatcccctactttgtatagtaggttgaagaagtaactgatagaagcaaggatatcacctggtgtgatgtgtttcacatcacgagtaatgtttgcattaccaattacattaattacgcgttcgccttccgactcaggagcataaatcttaatagattgcagctcaacatcgccttctaccactccacccattggtttcgctgttttgaatccaatgtttttctctaagtaaggtaaaatgcgatcaagtgtacgacgatctaagattgttccttctgccgctaaaatttcaccagtttctggatccactaatgtttcagctaaacgttgattaaacaatctgtttttaatgtgtaacttcttgttgatcttatagcgacctacatttgctaaatcgtagcgctttggatcgaagaaacgagacacaagtaagctcttagcattttctactgttggtggttcaccaggacgtagacgctcataaatttcaagcaatgctttttctgtgctatctgtgttgtctttttctaatgtgttgcttaagtattcgttatcacctaaaagctcggtgatttcttgatcagagccaaaccctaatgcgcgtaacaaaacagttacaggaagtttacgcgtacggtcaatacgcacatatacaacatccttagcatctgtctcatactctaaccaagctccgcggtttggaattacagtagcagtaaaaccacgttttccgtttttatccactttgccactatagtatacgcttggagagcgaactaactgggaaacgataacacgttctgcaccgttaattacgaatgttccagtctctgtcatgagtgggaaatctcccatgaacacatcttgttcttttacttcaccagtttccttgttgattagacgcacttttacacgaagtggtgctgcatacgtcacatcacgctctttgcattcgtctacagagtatttaggttcacctaagctgtagtcgataaattcaagcgatagatttcccgtaaagtcttcaatcggagaaatgtcttggaacatttctcgcaaaccctcatcaagaaaccactgataagaagaggtttgaatttcgataagatttggtaactctaatacttcactaatacgggcataacttcttcgttggcggtggcgtccgtattgaactagttgacctgtcaactgcttcacccctcaaatcatgagtattataaatgcacaaaaaaatttgtgcaaaatcacaaataaatacaactactgctattagcgtagtctctttctcttaaagataaatacgttgagtctttctacctgctcaaaaaagaaaaatggcttctataagaaaaccatcattctgtttcataatctgctgattttactatcttttccaagagaaacaaaaatatacatctttctcaacgcagaaaatcatatattggcattgtataatgttaacatagccaaaaataaccgtcaacgtttttttgattttatgatataatatccttttttcttttctacaacctcaacttcagaaaatacttcttctagtttttttagcgcagacggtgcaccttgtttcttttgaataacaatccaaagctctccatctggaactaaatactccacagctttttctaaaatctcatgtacgatatctttacccgcacgaattggagggttagatagaatagcagcatacttaccatctacattttcatagacgctactttgaaaaatacgtatattctcgattttgttattagcggcgttttctttcgcaagcccaagtgccctctcgttcacatccaccatgtgaacttcacgaccttgaaactctttcgctaacgacaaaccaataggaccgtatccgcaacctacgtctaatatatcacctttaatatctggcatttgaaacgcttcaattaaaagacgggaaccaaagtccacttcgtttttcgagaacaccccatggtcagataagaaagtgaatcgagatccacgaagggcaaactcccatcgcttacgatcacttttactagaagggtcgttagaaaaataatggtctgccatatggccacctcttttctttacagttaaaaaaaagctcgcatgagagcgagctttttttaaagcatcaaaagttaattacttaacttctacagcagcgccaacttcttcaagtttagctttgatttcttcagcttcttctttagcagcagcttctttgattacttttggagtgttgtcaactaattctttagcttcttttaagccaagaccagtgatttcacgaacaactttgataactttgattttttgtgcaccagcgctagttagttccacatcaaattcagttttctcagcagcagcttctccagcgccaccagcaacagctacaggagcagcagcagttacgccgaattcttcctcgatagcttttactaagtcgttaagttctaatacagtcatagatttaactgcttcaatgatttgttctttagtcattgtaaatatcctcccttaaataggtttgtattgttttatcgataatacgtaattatcttttaaaaaattaagcgccttgctcttccttttggtctgcaactgctttagtagcaagtgcaaggttacggattggagcttgaagaacgctaagaagcatagaaagtaagccttcacgtgatggaagagtagcgattgctttaacctcatcaagtgttacaagtttaccttcgattacgcccgctttaatttctaaagcttcatgatctttagcgaagtcgtttaatactttcgcaggagcaactacatcctcgttactgaacgcgattgcgtttggtcctgttaagaattcatttaactcagccatttcagcagattctgcagcacgacgagttagagagtttttgtaaactttgaactcaacgccagcttcacgtaattgcttacgtaattctgttgcttcagaaactgttaaaccacggtagtcaacaacgattgtagatttactagcgcgaagtttgtccgcgatttcagttacaacttgttgtttagtttcgattactttgctcatgttattacacctcctgtagattatatagaagatgtaccgaaagtgcactaaaaacctccatgcccaacttgtagacatggaggcatatagtcacagaaaaaagattccgcttcgtatattaacacctaggtaggaaattaagtctattgacacctactgtctacggtacactaattaaattcacaacataaatgattatattaaaacttctttatgaagtcaacttccaaaatttacgctaatgtagaaacgtctacacgtacgccaggtcccattgtagaagcaactgttacgttcttcatgtaagtaccttttgcagcagctggcttaactttttgtaaagtgtcagcaattgttttgaagttttctactaatttagcatcttcgaaagatactttaccgattggaacgtggatgttaccagctttatcaacgcggtattcaactttaccagctttgatttcgttaacagctttagttacatcgaaagtaactgttccagttttagggtttggcattaaacctttaggtcctaatacgcgaccaagtttaccaacttcacccatcatgtcaggagttgctactactacatcgaaatcgaaccaaccttgttggattttaccgatgtaatcagtatcgcctacgaagtcagctccagcagcttcagcttctttagctttttcacctttagcaaatactaatacacgttgtactttaccagtaccgtgtggaagaacaactgcaccacggatttgttggtcagctttcttagggtcaacacctaaacggaatgcagcttctacagttgcatcaaatttagctgtgtttgttttctttactaattctactgcttctgttgcagagtaagcagctgcacgatcaacaagctttgcagcttctacgtactttttacctcttttagccatttttatttcctcctcgaatgtggttttagcggaataacctcccacgtttacgcctgttttcaggtataacctgaggatgagcgccatccatttatttaaaaacgataatcatttacgataataaaggttgcgaattggaattccagacccgcaaccttttttaaaaacaaatcgaattagtcttcgataacgatgcccatactgcgtgcagtaccttcaaccatacgcattgcagcttctacgctagcagcgtttaggtcaggcattttagtttcagcgatttcgcgtactttatcacgcttaacagttgccactttattacggtttggttcaccagaaccagactcaataccagctactttcttaagaagaacagcagcaggaggagttttagtaatgaaagtgaatgaacggtcctcaaataccgtaatttcaacagggatgataagaccagcttgatctgctgtacgagcgttaaactctttacagaagcccatgatgttaacacctgcttgtcctaatgctggaccaactggtggagctgggttagctttacctgcaggaatttgaagctttaccattttaattacctttttagccacgagacacacctccttaagtccgtgatgtggtcaattggacagtgatttgccctcccacgtcatattttatctgtaaggataaaatctttcaaaaaacgtctccgataacgaagacgtactgacttaaaagatattatcactttttacaattcatttcaagtttcattttataatttttcaatttgatggaagtcaagttcaactggagtctcgcgaccaaacatatccacaagcacgctaacctttttcttctccacatcaatttcttcaatagcacctgtataatctgcgaatggcccctcatttacacgtactgtctcatgaagttcaaagtcgaaatcaaccacttcgttgtccattcccatatgtttcataatggtaacaacttcctcttctaatagaggtgatggtttagatccagaaccagaagaaccaacgaacccagttacacccggcgtgttacgtacaacataccaagagtcatcagtcatgattaattctactaatacataacctgggaacacttttcttttcattaatttttcttttccgtttttcatttctacttctacttcttccgggacaacaacacggaaaattttatcttgcatacccattgattctacacgtttctctaggtttgcttttactttattttcatatccagaataagtatggacaacataccaacttttttccattcatttaggacgagcgtccttccctccctgacgtacatttttttgcgcaaatgaaaaaacccgttcaccgggcttttacacagttcttataaataacattatatcatggataagtgcttcttattcaagaattaaccaagaattaaccgaattaaagaagaaatgcccatatcaactactgcgaagaaaatcgcaaagaacacaactgtagcaacaacagtcgctgttgagcggagtaattcatcttttttaggccaacttacttttttcatttcgcgacctacatcgccgaaaaagttcgttaaacgcatctgcgggacctccagtgtattatttcaattatttattttgtttccttgtgaactgtatgctgattgcatgttttacaaaacttttttatttcaagtcgctctattgagctcgtatctttcatagtagagtagtttcgatttttacactcttcacatgagagtacaacttttttcctcattagttacaccaaccttgtaacattatgtccctaaaaatgtatcatacaataaaagacaatgtcaatgacatgcattttgtactctctacaaaagaaaacaggtgatttattttacacctgcagcacttgttacttcttatgaatttaaagttgtactttctctcatttccatatatcgttccaatttcctctttactctttgtaaagcgttatcaatagatttcacatgcctgtttaactgttctgaaatctcttgataagaacgaccatctaaatataaagaaagcactttcctttctaaatcgcttaataattcagatatttttgattctatgtctgtatattcttcctggctaatgatcatctcttcaggatcagtcaccttcgcttcagaaataacatccaataacgttcgatcagattcctcatcgtaaatcggcttatctaaagacacatacgaatttaaaggaatatgtttttgtcttgttgccgttttaatagcggtaataatttgtcgagtgatacatagttcagcaaatgctttgaatgaagacagcttgtcctctttataatcacgaattgctttaaacaaccctatcataccttcttgaacaatgtcttctcgatcggcacccactaaaaagtaagatcttgatttcgcacgaacaaagttcttatacttgtgaattaaatattctagagcgtcagtattaccttttcgaactaactcaacgattgcctcatcctctaaatcacgaaatgtaacgtcgcctatacttacgaagcctgcttccaccttgatccctccgaccgctatttatttagcaatattatacagtaaaaagataaagagcgtcaatgcttcaacgctctcctcttcttaatttttctaatttttctgtaatatccttactaaatatctttcgcatggcgggctgctgttctttcgtgtcttttgtacgccttcttacttgttgttccatcgcttgtacttccaactctaattcacgcgcagattttcgaagggcaccttgcccaaatataacccattgttctgtataatcagaagtcgcaacatatatttgtgtatttatatttctaagctctatcgcaagttgctctatcttttcgtctgcagtttgattctttcgtgtgaatattacttctacacgagattgtttcatctttttttcaataccatggactgtataggcatcaaagactatcatcacttttgtgcctgtataaccttgataatccgccatcttatcaataagcgcatctcttgatgattgtaaatctacatcccgcagtttcttcaaatctccccaagctccgataatgttgtagccgtcaacgattaaaatatcgttcattttttatttaccaatttcgtgacgtttacgatatacctcatacattaacaaacttgcggctactgaagcatttaaggatgtaactttaccaaccatcggtagagtgattaagaaatcacacttttcaccaataatacgactcataccttttccttcactaccaattactaatccaatcggcattgtaccatctaaattacggtaatccgttttccctttggcatctgtaccagcaatccaaagtccacgctcttttaattcatcaattgtacgagataagtttgttacgcgcgcaacaggaatgtattcaatcgctcctgttgatgctttcgcaactgatgcggtaagtcccacagctcttctcttcggaataataattccatgagctcctgttgcatcagcagtacgcataatagaacctagattatgcggatcttcaatctcatctaaaatcaagaagaacggatcttcattacgtttttctgccactttgaataaatcttctaactctgcatactgatatgcagctacttgagcaattacaccttgatgattaccctcaactaattgatctaactttttctttggtgcatgttgtaaaataatcttattttctttcgctaacgctagtacaatttgtacttgtcctttggcagcaccttctgcgatccaaattttattaatatctctccctgatcttaacgcttcaattacagggttacgtccgataatatattcactagtcatgatgatgtgcccccttccttttcttctaaaactgcaattgccttatatacaatttcgtctaatctttcacgattatttaataaatgatgataaccaattagtgcttcaaaggctgtactatgtcgatatgtttgtacatccgtatttttcggaactgtacctgaatttgcattacgccctcttcttaataccgcctcttcttcctctgtcaaaaatgccgtctctaataaatgataaacaactttcgcctgtgcttttgctgaaacaaagctcgtccctaagcgatgtaattgattagggcgaacttttcctttttgaaggaggtgatagcggatatattgttcatataccgcatcacccatatacgctaacgccaagctgtttaattgctttgcatcaatcatccttatcctcttttccatcttgtaccttgagcggtatcttctaaaataatattacgttcttttaaatcgtcacgaatttgatcagacaatgcgaaatcgcgatttttacgagcttcaatgcgcttttggataagctcttcaatttctttatccagtaattcttcttttgataattctaatcctaaaatatcaaataacgtttccagttgttttacgtatgcttcaatcacaactttagatgtatgctcttcaagtaaatattgatttgcatgatttgctacgttgtataattcggtaattgcatttgcagtgttaaagtcatcattcattgcctcttcaaatgcagtctggaatttctctatttcagctaaccatttctcattatggtccgttaaatccgtactactctccatacgatgctttaagtttccataagctgttttaattctttccagtccattattcgtactttgtaataactcttcactaaagttaatcgggtgacgatagtgtactgataacataaagaatctaattaactgcgggtcgtattgcttaataatatcgtgaactaaaataaagttacccagcgatttagacatcttctcattgttaatattaatatatccattatgcatccagtaacgtgcaaacgtttttccagtcaatgcctctgactgcgcaatttcattttcatgatgcgggaacgccaagtcttgcccaccagcatgaatgtcaattgtatcccctaaatacttacgcgccattgctgagcattcaatatgccatcctggacgtccttgcccccaagggctttcccagaagatttctccttctttcgcagctttccataaagcaaaatcaagagggtcttgtttcttttcccctacctcaatacgagcaccgtgacgtaaatctgcgattggttgatgtgataatttaccgtaaccttcgaattccttcgtcttaaagtacacatcaccctctgattcatatgcataccctttattcacaagttcttgaataaattcaataatgatatccatattttctgttacacgaggatgaactgttgcgtgtttgcaacctagtgctgttacatcttcaaagtacgcttcaacaaaacgatcagcaatcgttggtacatcttcacctaattcatttgccgctttaattaatttatcatctacgtccgtaaagttagatacatattgcacatcgtatcctttgtattctaaataacgacgcactgtatcgaataccataggaggtcttgcattcccaatatgaatgtagttataaactgtaggtccgcatacatacatctttaccttattttcttctaatggaacaaactcttctttttgacgtgttaacgtattataaatgtgaatagtcatttttatccttcctttctacctttaattccaattgtttcttcaatttatcaagttctacttccatagcctttaatttatcaaaaatcggatctggaaggtcagagtgatttaattcttgaccaatctttactccattttgaataacgacacggccaggtatacctacaactgtagaatgtgcaggaacttcttttaatacgacagaccctgctccgattttagaattctctcccacagtaatagacccaagaactttagcacccgtcgcaattaatacattatcctgaattgttgggtgcctcttccctttttcttttcctgtaccacctaatgtaaccccttgataaatcgttacattatcaccaatttcacaagtttctccaattacaactcccattccatgatctataaaaaagcgtcgaccaatagttgctcctggatggatctcaatgccagtaaaaaagcggctcacttgtgaaacaaaacgtgcaagaaagaaaaaatttcttttataaaaagcatgtgcaattcgatgggcccaaactgcatgtaatccagagtaagttaaaatgacttcgaaataacctcttgccgctggatcctgttcaaaaacgacttcaatatcttcccgaagcctcttaaacatcggtgttccctcccctttatgggctgcttttttgtcgaacgaactaactcccctaactcatcacttctcccctaattctttatataaggagataaattctatattcatacctatttacacggtataaaaaaaaggcgtctctgtcatattgacagagacgccttttaagcgcggttccactctgtttaggcttaaaaaagcctcaaactcatccatgataacggtgtacaccgctcctgcttactttgcggcctaagacatcccacgaagcaattcgctgttcagcagaagactcgaaggggcatttcaaaaatccgcttataaaccactcccagcctaaaggtggttctctctgtaaaaagcctgattttctacttctccttctcgtcgcttttccttattaggttttaggtatacttattatatttctaaacctagaaaatgttaaccaattactttttgaagacgatttaaaactttttcttttccaagaagtgcaatagcattcggaagctctggaccatgcgtttgtcctgtagttgcaacacggattggcataaataaatttttacctttatgtcctgtttccttttgaactgctttaatcgctgccttaattgctgctggctccattgcttctagagcttctatttgaccagcaaatgcacgaagtacttcaggtacttgttcaccatttaatacttcttgtccttcttcttcatagtcaacatgatctttaaagaacatttcagaaagctctacaatttcagctccaaaactcatttgttcatggtataaagcaattacatcacgaatccaagcttggtcttgttcgcttaaagtttctcccacacgtccagctttcactaaatgcggtaagcttaactctacaaccgtatctaaatcttgctttttcatatactggttgttcatccattttagtttttgagaatcaaataatgcaggtgattttgataaacgagctgcatcgaacattttgataaactcatctttagagaagatttcttcttctcctaccggagaccaacctagtagtgcaataaagttaaagattgcttctggaagatacccaagctctttatattgctcaataaattgaataatagattcatcacgcttacttaactttttacgactttcattaacaattagagtcatatgaccgaattgtggaatatcccagccgaaagcttcataaatcatcatttgtttcggtgtatttgaaatatgatcatcaccacgaagtacatgtgtaatttccattagatgatcatctactgctactgcaaagttataagttggaattccatcttttttcacaataacaaaatcaccgaaatcatttgaatggaacgcaacttcatcttttacaatatctttgaatgtgtagtcacgatcagctggtacacggaaacgaatacttggaatacgtccctcagcttcaaattctttcacttgttcttcagttaattcacggtggttacctgcgtaacgaggtgtttcaccgcgagcgatttgtccttcacgctctgcttctagctcttcttctgtcatataacatttataagctagaccacgctctaataaatcttcatataattttttataaatatctaaacgctctgtttggcgatatggtccaaattcaccaccaacatcaacaccttcatcccagtccataccgagccatttcaagtattttaattggctttcttctccaccagccacgttacgttttacatcagtatcttcaatacgaataataaatttgccatctaaatgacgagcaaataaataattaaataatgccgtacgcgcatttccgatatgtaagtgtcctgttggacttggcgcgtagcgtactctcacttgcttttccataattggtacaccttccatccttaatgtcaacacattctataattgtacaccaaaaaaatgtgattatccatcttacgaattaaaaaccattattttttctgtaataaaacaaccgcttgagaagcaatcccttcttctctacctgtaaatcctaatttttctgttgttgttgcctttacattaatgttatcgatagacgtttctaacagttcactaatgcgcttacgcatgctctcaatatgtggtgccatttttggttgttgagcaataattgtacaatctaaatttcctaactcgtaaccttgttcacgcacaaattcccaaactttttgtaacaatacagctgaatctgcatctttaaaagctgggtctgtatcaggaaagtgctttccgatatctcctgctgcaatcgcacctaaacatgcatcagcaatcgtatgtaacaatacatctgcatctgaatgaccgattaatcctttctcgtgtggaattgtaattccaccaataatcaacgggcgcccttccgcaaattcatgtacatcaaaaccttgtccaattcgaaacatccttacttcctccttaagctaaactactgagctttatgactctatattatatcgctatccttataaagaaaagcccggctgttgccgagcttttctttattaacacatcatcaacgttatttcttctgaacacgtaggaaactttcagcaattaatagatcttccggagtcgtcactttaatattatagtaactcccctctactacacctacttgcttcccaacacgttctacgagacttgcatcatctgtgccaagaaaacaactttgctttgcgcttctatgagcttctagcaaaagagaaacagagaatccttgtggtgtttgtacagcgttaagttgagatcgctctaccgtttctacaacaacaccctgctctactttcttaacagtatcttttactggcactgcacaaatggaagctccatatttttctgctgcaattaatacatcgcgaatcactttattcgttacgaacgggcgcgccccgtcatgcacaagaacatattcgacaccactcgcatactgaagtgcgttatatacgctatcttgtctttcggctccaccctgaataaattgtacgtgcttttcaatctggtacttctgcattaactcttcaaaatacgggcgttcttcttcgttaattgccataataatacttttgcacgctttatctttttcaaaagcacgcaatgtgtgcacaataattggtacttcatctataagtaaaaataacttatttttaccagcacccattcgttttccttggcccgctgccggaataattaatgtatacatattaataatcctctacttataatgctttttctagcaatttacgttttgcaaaaatcatacgaccagccgatgtttgtaatacgctagtaacaagtacgtcaagttgtgaacccacatactctctaccatcttctactacaatcatcgtaccatcatctaagtatgcaacaccttgattttgttctttaccatctttcacaacataaacacttaattcttcaccagggagtacgactggtttaatcgcattagctaaatcattaatgtttaacaccgtaaccccttgtaattcagaaactttgtttaaattgaaatcgtttgttactacagttccaccagtgatttttgccaactttacaagcttgctatctacttcttggatatcatcgaaatcgccttcataaatttctaccggaattggcatctccttttgaatacgatttaaaatgtctagccctctgcggccacgattacgctttaaagcatctgaagaatcggcaatatgctgaagctcttctaatacgaattgcggaatgacaattgttccttctaaaaactttgtttggcaaatatctgcaatacgtccgtcaataattacactcgtatcgagaattttccaatgagtcgtagatttttctgcttcgacctctacctcttcattctcactattgtttttcttcttacctccgcgttggggtaatgtaaataatcctagcaattcattcctctttttaaatcctacttggaatcctaaatatccaagtaaaagggtgaagaacacttgcaacaccgtactaataactggaattgtaaattcacgaattggtatcaaaattaaatatgcaacaataagaccagagattaatcctaatgtaccaaataaaacatctgctacaggcgcctttacaagagcctcttcaatatgcttaataagttgaacaatataatctacaagccaaaatgttgttaaaaataaaataattgcaccaataattgcacgaacatacgatccttccaacaaaggaaccgcaccgatatctaatacattaataatttttgggattaagtaaatccctaacgctcccccgatcactaaaaagaagagctgtacaatccgttttaacatccaaccacctcctactcattattaaccattgtttcgctaatcaaaacgccgaatgcaaaagcggacgtgtttttttgtaaatagttttatttaccaatatatcatatcatataccaaaaatgttctagtgtcgttatattatagaatcaatgtaatattcttaattgtgtctactcatatagagatgctcttgaattctttttagaccttctcgtattttcttcgctctcacttctccaattccttccacatcatccaattcattaatagttgctcggcaaacaccttgcaatgttttaaatcgattaattaaattctcgataataagtggcggaacacgagaaatcttgcttgtgattcggtaccctctaggtgtcacactttcttctaaacttgtttgtcctggatacccaagtaatttaactaaatcactatcctctaaaagttgtgtatttgcaagatcttgtaactttttcaagatttgatgatggtcttgtgttttctcctggtgataatctttaattaacaatgctgcctctgcctctaaatcagctagtaattctgtaagctgtaaacgaattaacctaccttctgttcctagctcatgaatatagctcaatatttcattttttatacgcagcaccatttcaacactatgtaaaacgtgaaccacctcggacattgtaacgacctcttcaaattctagaatacccaaattcgtaatgccgtcattccatacagccttatatttttctagcgtttgaattgcttgatttgccttcgttaaaatgacacctatatcttttagtgtataacgtaagttcccttgatatagcgtaattacattacgtctttgtgaaatggccacaacaaggctgcccgtctgctttgctacacgctctgctgttcggtgacgcatacctgtttcaatagaatcaatagatgaatccggaactaactgtgcgtttgcaattaaaattttacttccagtttcatttaaaataagtgctccatccatttttgctaattcatataaactagcaggagagaatgcgcaattaatatgaaaaccaccatcaacaatgcttttaatctgctcattatacccaagaacaattagtccccctgtttgtgcacgaagtacattatctatcccttcgcgcagtggtgttcccggggccacgagctgtaaaatattaattatacttttgacacgttgcttattttcttccatagcctagcctcctaatgtcaaacgaagcgcttctcctaaattagaaacacctacaacctcaatcccctctggaattgtccacccccctaaattttttctaggaatgatagcacgttgaaatcctaatttagctgcttcttgtacacgttgttcgattcttgatactcttcttatttctccagttaatccaacttctcctattaccgcatcagttggtgccgtagatttatctctaaaacttgaagctatacttaaggcaacagctaaatcaattgccggttcatctaatttcaaaccaccagctacttttaaatacgcatcttgattttgtaatagtaaacctgttcttttctctagtaccgccataataagcgagacacgattatgatcaattcctgtcgccattcttcgaggatttccaaaactagtaggggaaattaatgcctgtatttctactaaaactggtcttgttccttccattgaggcaactactgttgaacctgcaactccaactggtctttcctcaaggaaaatttcagaaggatttaagacttctgcaaggccaagttctttcatttcaaagatacccatttcattcgtagaaccaaaacgattctttacagctcgtaaaatacgatatgtatggtgtcgatctccttcaaagtaaagaactgcatcgaccatatgttctaacatacgcggccccgcaattgcaccttcttttgtcacatgtcctacgatgaaaattgggattccctttgtttttgcaagtttcattaattctgctgtacattcacgtacttgcgccacgctaccaggagctgatgtcacctcaggtaaatgtatcgtttgaatagaatcaataacaacaaaagcaggattcatctcttcaatatgtgctgcaatacgctgtaaatctgtctctgatacaacaaatagattactaccatttacatgtaaacgatctgcacgaagtttaatctgctttgctgactcctcacctgatatatacaatacatcatatgaagcatctgctaattgcgaggaaatctgtaataataacgttgattttccaatcccagggtccccaccaataagtactaaagatccatctacaattccgccacctagtacacggttaaactcctgaaattttgtttcaatacgtgcctcagactttgtttctacttctgtaagacgtcttggttttgttacttctgtttgaattgcatttgcataatttaggcgtctggatgatacaacgggttccatctcttcaacaagcgaattccattgaccacaccctggacatttacccatatattttggtgattgataaccacactcttgacatgtgaattttgttttctttttagccatatctttttatatttcacttcgctttcatctataaacatttgaccttctcgtacaagaaagagggctatctcgtagccctcttagtttgtctatacttattttaccttttcagcactatgaatgacaaatgtttccccttctacatcaaagataactttttgtcctttctcaatagcaccttttaaaagttcttccgatagtctatcttctacatgcttctgaattgctctacgtagtggacgagcaccatattcacgatcaaaccctttatcagcaatagctgcaatcgccccttctgttaattgcaattcaatttcttgttcttttaagcgattcactaactgatttaccataagagtcacaatttcttgaatatgttttttctcaagcatatggaatacgataatttcatcaatacggtttaagaattctggacgaaatgcctttttcagctcatccattactttacctttcatatccgaataatcacgactttcatcttgtacgttaaatccaagatgtttgttacgttttaacgcctcagcaccaacgttagacgtcataataacaatcgtattacggaagtcaactgtacgtcctttagaatcagttaaacgaccatcttccaatacctgtagtaaaatattaaatacatcaggatgcgccttctctacttcatctaataggacaactgaatacggcttacgacgaaccttctctgttaattgtccgccttcttcatacccaacatatcctggaggagaaccaactaagcgagaagttgaatgtttctccatatactcagacatatcaatgcgaatcattgcatcctcatcaccgaacatagattctgccaatgctcttgctaattctgttttacctacacctgttggtcctaagaaaataaatgaaccaattggacgtttcggatctttcagtcctgctcttgcacgacgaacagctttcgctacagccactaccgcttcatcctggccgatgacacgatcatgaagaatggattctaagtttaataatttatcagtctctgtttgtgcaagtttagaaacagggatacgtgtccatgtagaaacgacatttgcaatatcttctaccgtaacctctgaattttcttttccttgttgttctttccactgacgctttgtatcttccaatttctcacgtaagcgttgttccatatcacgtaaggaagcagccttttcaaactcttgactttgtacagccgcatctttttcttttcgaatttcctcaagattcacttcaagctcttttaagtttggtggtgttgtataagaacgtaagcgaacctttgaagcagcttcatcaattaaatcaattgctttatctggtaagaaacgatccgtaatataacgatcggaaagtttcacagctgcatcaattgcatcatctgtaatagacacacggtgatgggcctcataacgatcgcgtaaacctttcaagatttgagttgattcttctagactcggctcatcaacatgaattggctggaaacgtctctctaaagctgcatccttttcaatatatttacgatactcatctaaagttgtcgcaccaatacattgtaattctccgcgtgctaaagatggttttaaaatatttgatgcatcgattgcaccttctgctccacctgcaccgattaatgtatgaagttcatcaataaatagaataatattccctgcttgacgtatttcatccattactttctttaaacgatcttcaaactcaccacgatatttcgtcccagctaccactgttcccatatctagtgtcataacacgcttatctcttaacgtttcaggaacttcattatttacgatttgctgtgctaacccttcagcaattgctgttttacctacaccaggctctccaattaacactggattgttttttgttctacggcttaacacttcaattacacgttgaatttctttactacgtccaataacaggatccaaacgattctcacgtgcaacaactgttaagtcgcgcgctaaactgtctagtgtcggtgtattggcatttgtcgatgaaccaccttggtgacctgaacttgcctcgttacttccaagaagttgtaacacttgttgtcttgctttgttaaggctgacgcctaaattatttaaaacacgtgccgctacaccttcaccttcacggattaagccaagtaaaatatgttctgttccaacgtaagaatgtcctagcttacgcgcttcatccatagacaattcaataacttttttagcacgaggtgtataatgtacagtttgagaagcttctgttccacgtccaattaacgcttctacctctttttgcactttctccgggctcaatccaagagcaattaacgcttttgctgcaattccttcaccttcgcgtacaagcccaagtaaaatatgttctgttccaatattattatgcccaatgcgaattgcttcctcttgagataaagctaatactttctgtgctctttctgtaaatcttccaaacatcatagaaatcgcctcctacttgcgcttagtttttttcaatacgtaatcgctcacggattaaggttgctcttcgataatctctttcttctggtcctaaaggtcctcctgcgtattgttgtaaaatacctggttgcgtaagaaccattagctcagtcaaaatatttctcgatataccttttatatatcctagatcaataccaagtcgtacatccgataagcaagttgccgcttctgcagattgaattaaacgactatttgctagtataccgtaagaacgataaaccttatcttcaagctcaatactcgaattttgtacaattaattctctggccaatttttcttgttgtataatttgctgcatgacactctttaaatctgcaataatatcttcttcggatttccctagcgtcatttgatttgatacttgaaatatattacctaacgcttcgctaccttcaccgtatattcctcttactactaaacctaatttttgaattacttgtataatacggctaattctttttgttaaaaccagccctggtaaatgaatcattacagaagctcttaatcctgtaccaacgttagtaggacaactcgtaatatatccaagtgattcatcaaaagcatattcaacctctttctcaatccaattatctatttgattggcgctttgaagcgcctttgataactgtagtcctggaaataggcactgaatcctaatgtggtcttcctcattaagcatcacactaatgtgttcgctttctgataacagacatgctccatattcagtccctgctagatttggactaattaaatgcttttcgactaaaactctcctttgaagaggcgttaattcattcatttttaatagtccaaacttcccaaagggctctaccgctttatttataaatttctttttaaataattcttgaaccttttgagcttcctcttcgttttgcatagtagaaaattgatattgcttaaaattacgagccaaacgaattcgactacttaaaacaatatcagaatcagggccatcccccttcatccatggactaatcgcttcattcataattttgtccagtgacatagaactactccccctctctatgctcactaagctgagtttcaagccctcgaatttcatctcttacctcagcagctttctcaaactcctcattctgtacatattgtttcagaataagttttagttcatctaattctttctttaagtggatatttccttccattcgttccggaatttttccacaatgttctgtatgtccaccatgaagtcgttttaacaatgggtttaagtgtcctttaaatgtatcgtaacaagaagcacaaccaaggcgtcccacctttgtaaaatgttcgtatgtcatcttacaacctggacatcttattgtatttgtatttgaaaacccgttttttccttctccaaacattgttgattcaccgtgtaataaaccagcaaatacatcatgaaatgaaaagttagactgtgatgattgaaagaaagacgtatagccactttgctctgcacattgctcacaaagatgaacttccgccttcttctcgttgattacttttgtataatgtaaagttgctggtcttatattacagttttgacaagtcatcaatatccccacctttacaacaggaacgatctacctcatgatacttttcatacattactagattgtcctctttccttaatccatttagataaaagtacatgctctttttcaaaacttctacaatatttaactgccctatcttaattatcattcttttacaaaagctgtatttatttatatttcagtgttcttaacattgcgcataatattcgagccctaagttcatctcgagaaggaatatccattgataatacagaacgatctagtacacttaacattagttttgcttcacggcctgttatgattccctcttctaataaacgtataatcatactctctgcattcccttgtgcaacgctatgatcaatcatatgaagcatttgatcaataatgtctatatcatcatgcagtttgacttttataatgcgaatgtaacctcctccaccacgtttactttctactacaaatcctctttctaatgtaaaacgggtattgattacataattgatttgagatggtacgcactcgaatcgatccgcaatctcatttcttttgatttcaatcacattattattacttaagtcaataacttgctttagatattgctcaatgatatcagatatatttctcatttatccgccacctttattgactttgactatctttgactttaattatatacgtattaataaaatttgcaactcttttgcttattcactatcctagccacattcccctgcatttaatcaaaatagtaattatttaagcacatttttttaattactatggattataaaagaaaacacgaaaaaacacgagtcatttgactcgtgtttagttgcttggcgacgtcctactctcacagggacaaggtcccaactaccatcggcgctagagagcttaacttccgtgttcggtatgggaacgggtgtgacctctctgccatcatcaccaaactatgaaggcatattccttcaaaactagataacattgctacatattatatggttaagtcctcgatctattagtattcgtcagctccacatgtcactcacgggtttataggtaaatccctttcctaaaaaacctaactttatcatacgaggcggtgacactatgaagtatgtaaaagttagtatgaatggtggaagtgaacataaattctcaatgactttagatcggtttaaagaacttattactacagagaatgggatattagaaaataaattagtatgtattgaaaatgtaatgattaatcctactaatatatcttctgtagttgaaaaaattggtgtaccggctaagtttatggaagcttaaaatgttagataaaaaacatccattagggatgttttttaatttataaatatgataatcgtacagtaaatatttgagtagattttatagcaatgactatgcatatattaagtacctgaacatggttcttaatacatgcacgaaataataagtacaagcatatattatatagtaggacaagatcttcgtgtcctacttaatactcagaaaaaacctctaatcacataagagcatccaattgcagggtgctcttattttttatgaaaatctactacgagtcttattttatagtaggatgcaataataaagggctattttgaaatagtgttctttagtctttaatgttaaatttatctttaacgttaataaatattaaaaataatatgatagcagaaattaagttagataagtagaaattttgatgaaacagtagttcgaagatgacatagaaagtaacgaataaggcaatagcaggtagtatgcaaataaatataaatctccaattttttaagtaatgtttataattagtaagtactttctccataaatatagctcctatatttttgtttttatataattatacatttagatacaaagattttcaaagtaaaatatttagcaattcaaaaatataaggagagcttttgttgaaaatccagattgctgtagcaatctggatttgactttaaagaactatactaaaatgatacactataatctacgttatttttgaaatgaatagagggatttgtgtgatagataaaattaaaaatgctgtagaggatatgtacgaagatgaggctaaagatttacttcaaagtattctcatacagttaaacttattagaagaaaactatagtgaagatacaattaaaaatttgatggatattccgaaacaattaacgagtaatcctacttataaagggaatgtaaaagaaagtacgcacgtacatattgcttttgatgattcaacggctggttgcttaaaatatatgttaagtcaagaagaattatttgaagagagtgttgttgctttttcggaattcttttcaattggaccgatatataggttgcatacgaatgaggggcaactagtaagacagaagtggttaataaataacttaactgcttatgatagttattttgaagaagaatatttatcaagatttatagcaactatagaagaactacatactattcctgttgaaacgcctattacaatttggaaggctgataatgcacatgaacatgtaggcctaagttttgtaatggcacaattaaaggataagaaaaacattcgagttattaatacgtctgaagcaagtagagaaatattaaaacaagagtatgatattcgtggaacgggagaattaccacctgaaagtttagctctattccaaaaaagttttataaagctaccttatttaactgaagagaagcgcatgaagtttgaaaatgagtgggatagattatcggaaagcatagaatgtttaagagtttggaaagaaaatgaagtgcattctgtacaggaagattattttgatcaatttataattgaatgcgcgaaaagtgtgggtgctgatcgagagttccttaaagctcctagagtaattggtgaagcacttggtcttgttgaacagttagttggagatactttcttagaatatcgcttgaaacaattaattaaacaagaagtatttgaatttgaaggttcgttagatgaaatgcgtttttatagtgtgaagttaaggaaataataaacacattctatttttgaaaggctcgtatttttaataatacgagctttttaagttgaatttgggctatacataagcttcccagagagggcatatcacatatgaatggtaaaggtaatgaatgaaaagaaggtgatttgttaatatgtataaccaacaaaattatccatatgatcaagcgatgtattataatccacatgactacgggtatgaacctacaaatgaagtgagagatattgaacaagaagattacagaccagatgatgcagaagatgctccaacgtcaccacctccgtcacaagcgccgtcgttaccgtctacatttgcttctccagcacaaccaggtaatatgaaatcatggatgtgtaactgtctaggaagatggggctatttacgcttacatcgtcctggtcctttcggaagagatttatggttcttcccgactgaagtgagaagaaatggagtgtcaggttacacgtggcaaggtggtcgtcgtcgtaaagtaagttatcgctatcaacaaattagtaattttatgtgcttcgcataaagagaagtgggagagtgaaacgattttactctctcacttttttatttttcaatatacgaagtaagattttgattaaaaatttacaattttcacgtttttattagagtataatgcatatgttgggttgattttcaaaaacaaatgagagtgagggaatacaatgtcaatgaaaaacaaagttgggttaagcatagaggatggcattaatttagcttcagctcagtttaaagaagatgcgtatgaaatttataaagaatcgcgaaaaaaacaacctatattatttgtaaaccaagttgaaatcggtaaagaatggctcattactagatatgaagatgctctgccacttttaaaagataatcgtttaaaaaaagattggacaaatgtgttttctcaagatataaagaacatgtatctttccgttgataatagtgaccacttaacaacacatatgctaaattcagatccacctaaccacagtcgtttacgatctttagttcaaaaagcttttacaccgaagatgattgcacaattagacaaaagaattgagaaaatagcagatgatttgataagtgatatagagcgaaaaggtacattaaatcttgtggatgattattcatttccattaccgattattgtaataagtgagatgctcggtattccaaaagaagatcaagcgaaatttagaatttggtctcatgctgttattgcatcaccagaaacacctgaagaaataaaagagaccgaaaaacaactatctgagtttattacatatcttcaatatttagttgatattaaacgaaaagagccaaaagaagacttagtgagtgctttaatacttgcagagagtgaagggcataaacttagcgctcgggaactatattcaatgataatgctattaattgtagcaggacacgagacgacagtgaatttaattacaaatacggtattagcacttcttgaaaatccaaatcaattacagttattaaaagataatccaaaactaattgattcggctattgaggaaggattgcgttattattctccagttgaggttacaactgcaagatgggcagcggaaccttttcaaattcacgaccgaacaatcgaaaaaggagatatggttgtcattgccttagcttctgcaaatcgtgatgaaactgtatttgaaaacccagaagtattcgatattactcgggaaaataatcgtcatattgcctttggtcatggtagccatttctgtttaggcgctccacttgcgaggttagaagcaaagattgctattactactttgtttaatcgaatgcctgaactacaaataaaagggaatcgtgaagaaattaaatggcaaggtaactatttaatgcgttctttagaggaattgcctttaactttctagaatagttaaaaggagacatgcatacatcgaaaatgatttacatagagtatgtatgtgttatttaaattcgaaacggaagggtgaaaacatcccaatgatcaactaattctatttgtaagagatcttcgttaaaaaacgaaatattcttctgaatagggttagtctgtacatttatagaaaagggatgtatttcgctctgcgaatatatagtctttttatatgatttgtgctgcctcctgttcagaacatgaaataggaggcttttttatgtcgacaaatgtagtaacgaaacaaaacaatggggtatcacaagtattaaaaaatcggtttgttcaagggattttagcatcagcattatttttacaaataggaatatgggttcgaaactttgcggtattactatatgtaatggaaatgacaaaaggtgatgcttttgctatttcgatgatttcagttgctgaattcgctccaatttttattttttcatttattggcggtacttttgctgataggtggaagccaaagaagacaatgatatggtgtgaaacgttaagttccatttcagtattcgctgtattaattacgcttatgtttggaacgtggaaaattgtgttttttgtgacactcatctctgcaatcctttcacagttttcacaaccatctggaatgaagttgtttaaacaacatttatcaacggaacaaattcaattagcaatgtctatatatcaaacgatatttgcaatatttatggtattaggaccaatactagggacatttatctttcatagttttggaatttatatttcaatcatcataacaggtatttcgtttttacttgcggcagttgtattgttattccttccgaaagatcttgaaaacgacgtagaaaagaaggatatcactctgttgcaggagatgaaggatggtattaagtatgtcaaaaagaaaaaagcattaactttgctagggctttgttttatggctgcaggactaggtataggattaattcagccattaggtatatttattgtgactgagcagttaggattatcaaaagagagtttacagtggctactaacagtaaatggtgcgggaatgattgttggcggagcattagcaatggtatttgcgaaaaacgttgctccgcaaaagatgttaattatcggtatgcttggtcaagcaattggtattggcattataggatattctacaaatttatgggtgacacttacagcgcagctttttagtggtttagctcttccttgtatccaaattggtattaatacgcttattattcaaaatagcgataccgattttataggtcgtgtaaatggtattttaagtccgctttttaccggttcaatggtagtaacgatgagtatagctggctcattaaaagagatgttttcattaagtatgatgtatgaagggacggctttactttttataattggattattgtttattttacctatatacaatttaaagccagtaatagcggtagaaagtgaaataagtggtaaaggaagtgctatacaaaatgaatcctaatccaaatgttaaataccctattgaaggcaatcaaaacgttcaatttataaaaaatataataacaaaacctaatatacttgttggtgactattcttattatgatgcgaaagatggagaaacatttgaagatcgagtattacatcattatgaatttcttggagatcgccttactattggaaagttttgttgtattgcatctggagttaactttattatgaacggagccaatcatcggatggatggattttcggcatatccatttaatatatttggaaatgggtgggagaagtatacacctagtttgtctgatttaccttataaaggtgatacagttataggaaatgacgtttggattggtatggatacaacaattatgcccggaataaaaataggggatggtgcaatcattgcagctaaatctgttgtgactagagacgtcgcaccatatacaattgttggtggaaaccctgcaaataaaataaaagagagattttcaaatgaaataattcaagaattattgcaaattcaatggtggcattttgatattgaaaaaataactggaaatattgatgctattgtacgcggagatattgaaccattaagaaagctaaaaagggaatgaaaaatggatgacaaatagtatcatacctccgaattttgttaatgataatagaacaaggaggtgtgatactatggcacaagacgttttatgtgaagtaaacaactgtaaattttgggcgaacggtaataaatgtagtgcagaggcaatttacgtagtaagtcataaaggtaaacatgcatctacaacggaagaaacagattgcaaaacatttgatccagaagtgtaaattctttaagggtagccaaatcgtggttgcccttttattaatgatagtattgataataaatatcattttcattcattaattttagctttttttgttattttttcatattttcttcataagtgatgtaatccaactcaattcatgttcaattcgtgatttactaaattcaatgacttcagtaataaaggctgaggtaacctctagagactgaatagcggtaagttgactatgtagtacgttttgacgtacagtcaaaatctcttttctagcttcatattcaagtttttcaaatagcgcgatacgaacaagaaattctgcattatttgtcgcaagtttttcgggaaactctcgtaacatttcagaaaaaatttcttctcctgtttctgttatatcgtacatatttcggtttggttttccaacttgtttatgtatttttttcgttatagcacccatattttcaaagcgccgaagggcagggtaaagcatgttgtgatttaattcaaaattctcacctaaacgattttgaacattttttttgatttcatatccatgttttggtccggtcgttaattctgctagtagtaaaatatcaacgtacataaaaatcccccttatatatttctcaagttctctaatgaaaaatcccctttagtatatgttaaaataacatatgatagtttatacaactttgaactgccgacctatcacttttattgtaaaagaaaagggaggaaagaactatggcttcacctgaaaatgttattttagttcatgaaatttcaaagctgaaaacaaaagaagaattatggaatccatatgaatggtatcgtttgatgagggataatcacccagttcattatgatgaagagcaggatgtatggaatgtttttttatatgatgatgtaaatcgtgttttatcagattatcgcttattttcaagtagaagggagcgcagacaattctcaatccctcctttagaaactagaataaatataaactctacagatccaccagaacatcgcaatgtacgttccattgtttctaaggcatttactccaagaagtttagaacagtggaaacctcgaatacaggctatcgcagatgaacttgtacaacatatcgaaaaatgtagtgaagttaatatcgttgaacagtttgctgcacctttacctgttaccgttatttctgatttattaggagtcccaacaacagatcgtaaaaaaattaaagaatggtctgatattttatttatgccgtatagtaaagaaaagtttaatgatctggatgctgagaaagggatagcattaaatgaattcaaagcataccttctaccgattgttcaggaaaagagatatcatttaaccgatgatatcatttctgatttaattcgagctgaatatgaagacgaaagattaaccgatgaagaaattgtaaccttttcattaggtttactagcagctgggaatgaaaccactacaaatttaattattaatagcttttattgctttttagtagattcacctggaatttatgaagagttaagaaaagaacctaacttaatttcaaaagcgattgaggaagtattacgctatcgctttcctgttacattagcccggaggattacagaggatacaaatatatttggttctttaatgaaaaaggatcagatgattgttgcgtgggttagtgcagcgaatttagacgagaaaaaattttcacaagcctctcaatttaatgtacatcgaacaggaaatgaaaagcatttaacctttgggaaaggtcctcacttttgcttaggagcaccacttgcacgtttagaggctgagattgcattaactacctttataaatgcttttgaaaaaatagagctatctccatctttctgtttagaaaaatgtatattggaaaatgaacaaacattaaaatacttacctattcgattgaaagctaaataaaaatcttaacaaggtgcatacatttgcatcttgttttttgtttctcaattgtgagttttcggtaatcaccttaatatggaattgtataaaacgtagaggaggattcttatgttgacttgtaatggaagtaaatcatttcaaaagtttattaaaggtgttacagatcttatggaaaacggtttatttgaagaagaaatagtgtgtggcattgaaaagttactagaagaacttttagaaaagaaaacatggcttccgttagataaacagaaggccaatttgactcaatatgcacgacatttattgtatgaagatccgctcaaacgttttgaagtactagctctcgtatggaaagatggacaatctacacctttacatgatcatgacggcacatggggagtagaaggcgttttttcaggaaggattatggtgcagaactttatacaaacgaaacaacttggaaattcacttgtttatttaacacatacaggaaatctttatttgggagaaggagaaacagataaagtaattccaccagcggattgtcatattcttgaaattagcaaaaatgaaagcgttattacgattcatgtctatggaaaacggttagaaaagtttaaagtatatataccaactgaagaaaaaaatgtgtacatgtgtgagacaaaatacattagttataattcatagtttaaaatccaaagcttttttaaaaagaaaagctttggattttatttttaattatttcttgacctgaaacgcttttcataaattataaataagaagtacctcacgaggattgtatgaaaacgatacctaataattaattagaactcgtgtatttatagaaagtggtgaagaaataatgaaattaatcgcaattgatttagatggaactcttctttcggggaataaaatgataagtaaagaaaatgcagaagcaattcgaacatgtcaagaagctggccatgttgtagcaatttgtacaggacgttcaattgttgacattgagcgattattgttagaagttgatttagagtgtccaatcattgcggaaaatggtgctcttatatataaagataaaaaaatgatgaagagatatccaattcaaaatatgcaggcacttgaaattgtagaataccttgaagagaatggtttatattatcagctctataccgataaaggtgtgtatgtaccggattatggagtagagagtgtacgtaatgaaattgagcatgtgaagaattcaaaagaaaatttcgacttgaaagagttagaaacaatcgcagcattatatcttgagcatacagcgtttcatagtgcggaaagttgtaaaccaattgtagaaacagatatacatgtgcataaactattaccattttcttatgaaattgagaaattaaaaaaactcaaagaaacatttcttcataatacagatttagcaattacatcttcatattggcacaatttagagattaatcatcgagatgctcaaaaagggaatggattatatactttagcagaacatcttaatattccggttgaaaacactgtagcgataggtgatgggctaaacgatgtttctatgatggaaaaagcgaacatatcaattgcaatggggaatgcagtagaagaaataaaagcaatgtgtaaatacgaaacgttatcaaatgaagaacatggtgtggcacatgctttatataaatatgtaatgtaattaaaaaagaaaaaagaatccaaatggattcttttttcttttttattaggggtaaggtattctatgagattcatagaagccttattacattttattatatagaatatattggaataaatgtttatatttttcataaaaattgtgaatattttatgaactttatacttattgcatgtttataccgctattagtaacgtgtatgactctcaagtgaaaattcagtgaattgtaagaaggaattcaagttacctagacaataagtgaggaatcaacgaaatatatactaattaaaggtatattcagtatatatattcttttcttattttaattgaaaaataaaatttgttcgaataattattctacagctatataccttcactagctttcttcgtataatggagaagtatgaattttagatttgtattaattttacatattgaggtgaaaaaggaatgaattcgcggctaatggaacttattgatgtgagtacaatagaaaccatggcagaacaattttataaattaactaacatatcacatcagcttcttgatgctgaaaaagagtgtgttttttcattcggaatgaatgagataaaaaagagtaaacttccaaagattgaaatccccattttcttatacaatcaacatttaggatcttttgttgtatggtccaaaaaaagcgaaattttcagttgtcaaaaatactttgaaatgctctcaagtttaattttagatggcgcaataaaagtatttcaaagtaaaaatacaacgttgctttctcggaaagaggaggaactacatacgattttacaaaacatgcctgttatggtcgatgcgcttgattataatggagattttgttttgtggaatcgagaatgtgaaattgtaacaggttataccgctgaagaaataattggaaatcccaacgcactgcaattactgtatcctgattataattatcgccatcaaatacaaaagaaatttttaacttgtggaaaaaatttcagagattgggaaatgcacttaacatgtaaaaatggtgaaatcaaaacaataatgtggtcgaatatatcagaacagtttcctgtaacaggatatagttattgggctgttggtgtagatattacacatttaaaagcgatagaagagcagttaaaacaacaaacatctgaactggaattaatttttaaagctttaccagatttatgtttcttaacagaagatgatggcacaattatagattacaaggcaggatctcctacaaagttttacgtacccgcagaagcttttatgggaaaaaagttttacgaagtattaccatcttcagtagcacagcagtttcaggaagccattaatcaagtgaaggaaaaaggaacgaatgtaattgtagaatatccactcacacttaatggaagtattaatttctttgaggctaggtgcttaccattattacatgataaaattatgattattgtacgcgacattacagagagaaaaaagacagaagaattgctaaataaatcagatacgcttgcagcaattggtcaattagcagctggcgtggctcatgaagtaagaaatcctttaactgtaattaaaggttttatacagttatttcaaattaataaagaagatcaagaaaaatattttgatcttatgctctctgaaattgaaaggatagaagcgatcctgcaagaatttctggcaattgctaaaacagatgagataaatacagaaaagaaaaatatttatcaaatttttaaaaatgtcgtatcgttaatgaatacaaaagcaattatgacaaatattcaagttgaactatttacggatgacaaagatataattattgaatgctcagaaaatcaattgaaacaagtatttattaatattttgcaaaattcaatcgaagctatgccaaatggtggggaaatttcaattcacataaaagaaataaatgatgatggtgtcatcattcatgtaatagatgaaggaataggaatacctgaagaaagaattaagagattaggtgaacctttttatagtacgaaagaaaaagggactggtattggattaatgttaagttataaaattattgaaagtcatcaagggacaattagtatcatgagcgaggttggtgtcgggacaacagtaactatttacttaccgaaagtactaagtaaacaatctctttctaattgtgacgacaaatgtatagcaatacgcactagtagtaattcttaaatcaattaatacccaataacaaagcgattagtgaaaactaagctttttgttattgggtattttttatatttaatttagtaaactttaccttttctttacctttgttttaatttctattaagttttaaacattatattaatatttgtacaaagcaatgtatagaaattgtacattacttttaatatagaaatgtgattattatttgaaatattgtaaggaggagattatgacaaggtgaaaaagcaagagaagaaaagtggtagagtagtacctctccggttaaatattttattcctttgtgtatttttattattttctggcattattattcagttagggaaagtgcaaatttttgatggagaaacatataaaaatgaagtagagaagagagaaaatgcaaccgtgggcctttctgtaccacgtgggaaaatatttgatcgtgaaggaaatccagtagttgataataagtctttacgtacgattacatatacaaaggtgaaaggtgtaaaacaagaagaaatattaaaatcagcaagacaacttgcagatattattgaaatgccacaagaagatatagataagttaacggagactgataagaaagacttttggatgcaattaaatccagaacttgctcaagacttagtatcaaaaaaagaaatagataagttccgagataaggatattaccggaaaagagctagacaaaaaaatagaagatttaaaaaggaaacgcgttacagataaaaatcttcaagaactaacggctaaagatatagaagtgttagctattaaaagtaaaatgacctcaggttttcaaatggcacctcaaattattaaaaaggacgttagtgaacaggaatatgcggtgattagtgaaaatttagcgaaccttccaggagtagacgcatcagttgattgggagagaatctatgtaaatgatggattattccgttctgtccttggtaacgtctcaaatgctgatgaaggattgccacgtgaacgattagattattatttagtgcgtgattatagccgaaatgatagggtcggcaaaagttatatcgaacagcaatacgaagatgtacttcatggtacaaaaaaagaagtaagaagcattgctgataaacaaggaaatactattagaacggaaacggtttcggaaggaaaaagcggtaaaaatttaactttaacaatagatatggaattgcaaaaaaaagtagaggagagcatagaaaaaatattaaaacaatataaagggtcagaatcaatgttagaccgtgctttcgtagtgatgatgaatcctaaaaatggccaagtattatcaatggctgggaaaagacttgtagaaaaagatgggaaaatggaagtagaagattatgctttaggcacgctgacaagttcatatgagcttggatcaacggttaaaggtgcaacagtgttaacagggtttgaaacaaatgcaataactcctggaacacatttttatgatgcacctatgaagtttaaaggaactaaggaaaagaagtcttggaaaaattttggtgatatagacgatctaagagcgttacaagtttcttcaaacgtttatatgtttaatatcgcattaaaaattgctggtgtggattatgtgaaaaatagttcactagatattaaacaagaatattttgataaaatgagatattatttcaggcaatttggactaggcgtacaaactggtattgatttaccgaatgagactgcagggcaaattggaagaaaagataatcagcctggtttcttattagattattctattggacaatatgatacatatacaccacttcagcttgcacaatatatttcgactatcgcaaatggagggtatcgaatgaaaccacaaattgttcaagagattagagaacaaaccgttcaaaaagatgaggttggtaaagtagtacaatcaatagaacccgttgttttaaatagaatcgatatgaaacaagaacatattaatcaagtaaaagaaggatttagaaaagtatttcaagaaggagatggaacaggagtaagagcgttccaaaaagcaccatataaaccagctggtaaaacagggaccgcacaaactgtatatggtggagaaaatgaaattgggcgaaatgcgaaaggcgatcgtagagaatgttataacttaacattagctggatatgcgccatatgatgatccagaagtagcattttctgttgtagtaccgtgggttgaaaatgataaatcgggcattaactccgatattggaaaagaagttttagatgcttattttgatttgaaaaataagcgagtaactggtgaagcgccaaaaacagatgcctctaaagagaattaaaatgtacgaaacgtctctagcatgtctgtaaactagaggcgtttttatctgggaatagattagaaatgaggtgtatatgaagctgtttattctaaaatattggaggaacatatgtagttacatattaattataataggggttatttttattaataagtcctttttattttgtatggtagaagggatttcgatgcaacctactttgaatgaaaaagattatatacttgttaataaggtaaacgtctgtttatcgtcttttcatcatggagatgttgtcattataaaaaaagaagacgagcctacttactatgtgaaacgaattattggattatcgggggataatatacaactaaaaaaggatgaggtatttattaacggtaaaaagcgtgatgagtcgtatatacatttagatatgtcacaagtatccaatcgtttttcaaattttagagaaataaaagttcctacgcataaattatttgtgttaggtgataatcgtaatcatagtaaagatagtaggaatacacttggacttattgatgagtcaaatataataggtaaagtagaaatggtattttatccatttgatcatataaaatggataaaataattctattaactattcacgttttataaaatcaatcatatattaatagcataggacaagcagaaaagcttgttctaacctcacagaacactccttatcacggttaggcatctacataggtagatgcttttttttatgttgatgactgaaaattatttatcaatataatgtagcaagcatattaggactattaggggaagattacttgtacaaataacagtatgcttaattaaaacaatgaaatgtaaggagtgaggaataagtgctaaatattttagtggttaattttccagcagagggacatgtaaatcctacattaaatttagtaaaagcctttactgaacgaggagataatgtacattatattacaacggcaaactttaaggatagaattgaagatttaggagctactgtacatactcatccggatctattaaaagagatttctattgatgctgaaacctcatctgggttaaatgctttttttcatgtgcatgttcaaacttctttatatatattagaaattacgaaacaattatgtgaaagtataaattttgatttcgtaatttatgatatatttggcgcaggagagttagtaaaagagtatttacaagttccaagtgtagtgtcctcacctatatttttaattccgccagaatttttgaagacattaccttttcatccaaatgcagatatgccattccaaccagaggaaatctctgaaaaattactaaatcagatggaacataaatttggagtaaaaccaaagaataatcttcaatttatgaataataagggtgatgtttgtctcgtatacacaagtcgctatttccaacctaataacgaatcgttcggagaaaataacatttttattggaccgagtatttcaaagcgtaaaacaaatataaagtttccactggaatcacttaaagaaaagaaagttatttatatttcaatgggaacactgcttgaaggactcgaaccattctttaatacttgtattgatactttttcagattttgatgggatagttgtaatggcaattggtgatagaaatgatatttctaaaattaagaaagcaccagataattttataattgctccatacgtacctcaatcagaaatattaaatgaagcagatgtttttattacacatggtggtatgaatagcgtacacgatgccattcattataatgtcccatttgtaataataccgcatgataaagaccagccaatgatagcgcaaagattaactgagcttgaagcggcacatagactattgaaagaacatgttaatgtgcacactttaaaagaggccgtaacagatgttctttcaaatgaaaagtataaacatggtataagaaaacttaatgatagctttttaaaatgtggtggttcaaaagaagcaattgcagttattgaatctcttttaaataaagtaaaattttaatcagtagggattttactacccataaatagcgggataaatagtcgtaactgtatacaagcatagaggttctcacctttatgcttgtatattcttatccagcaaattgcacagcagtatttgcgtgtaaaaaagcagtatcaaaaacgggaacagtaagatcattttgggagataagtaaaggtatttcagtacagcctaataatataccttcagcgccgttttgaattaatgattttgtaatttgtaataacttttctttagatgtttctgaaatgatccctctacttaattcatctaatatgacatggtggataaaggttctttcctcttcatttgggataattgtctcaatgttatatttcgctaatcgtgatttatagaaatcttgctccatcgtttgttttgttcctaatagtccgatacgttttatactctgttctaccatttctttagcacttacatcaccaatgtgaagaagcgggatagatattgcttgttctacttcttcggcaaatagatgtacggtatttgaacacattaataaacattcagccccagatttttcaactttctttgcaactgtaactagttcatttttcacttcttcatattgatggttttgtaataaagtagttacttcaccaaagtccatactatataaaactaactttgcattttgatcgtattgagagagtgtaagtgtattaatatgtttatagtataatgatgtagattcccaacttaatcctccaatcaaaccaataactttcataatgcattcctcccgaaacgattttgaatttattatttcacaattccgataagaatacaatgatttaaatgatctatttaataaaaaataaaaatagtgagaaaagtattgaaatttatactttttagtgccataatacgaattacaaattaatacttatccagagaggtggagggaacggccctaagaaacctcagcaacccctatgcaattttataggaaggtgctaattccgcagaggacacgatgtgttttttgaaagataagaggattcttgaatgtgaaagaaaatgacctcttatgtaagaggtcatttttttgttgtatagaaagggagtgtcgatgcataattcatttttaaattaaatatagagtaataaaagttgactaatatgagaggggaattgtcatgaacaaattatcaacaaagttagtagtagcaatcggtattggagcagcattatacgggatattaggactttggggattttccattgcaccgaatacatttattaaaccagcattagctatattaactgtttttggagcattatttggtccagtggcaggactgttaatcggacttatcggtcataccgtaacagatacgattgctggctggggtatttggtggggctgggttattagttcaggtattattggtttttcaatggggcttattcaaaaaagagttggttttagtgtgaaaaacgggtcatttaacaagggggatatttcttatttagcaattactgggctagttggtattgtcattgctattatatttgctggggcattcgatattattgtgatgggagaaccatttgacaaaattgttatacaagtattaggagcaacaatttccgatgtcatcgttttcttagtacttggattgccacttacaattggtttggcgaaatccaataagaaacatacacatttaaaaattgaaaagtagggatgttaacatgcaaccaattatttcgtttgaacaattcacctttcaatatgggcatgctgtgcagcctactttaagtgatattacctttcatatataccctggggaaaaagtgctaattgctggacgaagtggctcaggaaagtcgacattagctcattgtataaatgggctaatcccattttcttacgaagggaatagtacaggtaacgttttaattgccggtaaagatccgagggaaggaagtatttttgaacaaagtaaacaggtaggaacaattttgcaagatcaagatgctcaatttattggtctgacagtagaggaagatgtagctttttatttagaaaatgaatgtgtaaagcaagatgacatgaaaaagattgtttcggactcattaagaaaggtgaagatgcatacgtttcataaacaaagtccatatgaattatcaggaggtcaaaagcaaacagtttctctagcgggtttattaacaacaaatgcggatatattattgttcgatgaaccgttagctaatttagatccactaagcgccttacatacgataaaacttatgaaagatatacatgaacaatataataaaacgattgttattatcgaacatagaatagaagaaattttaaacctggatttagacaaagttatattaattgatgaaggtaaagtcattgcgataggaacaccaaaagaaatcttagcgtcaaatatattaccacgtatcggcttaagagagcctatttacatcgaagcattaaagagattacattttgatagtaataatgacgtaatatatccaatggaaaaccttcaaaaagaaaaggtaagcaacgttataaaagagtggatggagaaacaagtcatattaaaagggaatactaaaaacaaggaattacttaaagtggagaatttatcattttcatactctaataaacaaaaagtattagaaaatgtaaacctttcaatatatgaaggagaaattgtggcactgttaggacataatggagcagggaaatcaacattagctcatagtcttataggcataaacaaaatgaaaaatgggaaaatcttgttaaaaggtgaagatattagttcttggtctattcgtaaacgtggggaaatcatatcttacgtgatgcaaaatccaaatcatatgattacacagcctactgtttttgaagaagtttcatttacattaacattacataatttttctaaggaagaaattaagaatagagtagaaggaactttaaaaatttgtggtttatatccatttcgtaattggccaattcaagcactaagctatgggcaaaaaaagagattaacaatcgcatctgtattaacaacaaatcctaaacttatcatattagatgaaccgacagcgggacaagattattatcactataaacaatttatgtcttttattaaaaacctagctaaaaagggaatttcatttgtttttatcactcacgatatgaatctcgcgctagaatatacagaccgtgcagtagttctacatgaagggaaaattattgcggataatacagtgtttgatgtattaggcgatcaagaaacgttacaaagagccaacttaagagagagttctttaaccaagcttgttaaatttagtgggattgcatgtccagaaaaatttatggagctttatttagacagtaataggagggaggaaggtgcatagtacatattttcatcgtatggatgggatagtgaaattgtttttatttattttttgtatgacgcttacttttttgttttttgattttcgggtgttgctaatattatttattattgggtgtatcgggctcagcattgctaaaattccatttcgtaaaattttaattgtttttagtgtcatatttacatttagtttattaaactctgtcatgattttattgattacaccaactcatggatctgaattaactgaatcatataccgcgtttttacatgttggatatgcaacgattacatatgaaacattattttatgcagctacactttcattaaagtattttacgttattaccatttacacttctttttatttacacgacagatccaagcgaatttgtaagtagcttaagtaaacttggtattcattataagattacttatgcaataaatattgcactacgttatattcctgacatccagtctgagtataaaattattaaacacgcgcaagaagcgagaggagtggcttttgaaaaaggagaagcaagtttatgggttcgtatgaagaaccgtgttttaattttctggccactaatcattcattctctagaaagaatagatacggtttcaaatgcaatggatttaagaggatttggaaagaaggataaacgtacatggttttatacaagtaaggcgaaacgtgaagatttcatcgctttatttgccggtattttcatatttattgttgcggtatatttaaaattaaacgtatttcaaaacttttggtatccattttaaagcactctttaaacgagtgcttttacttatttttatgtagacatgctcaaaaaagggatatatacataatgtataatacgaaccagttaaaatgatcaactacctattagttttcaaaccaaaaggaggagaaaatatgagttacggtggttcttgtggttttggtggaggttttgctttactagttgtgttattcattctattaataattgtaggatgcagctgctggggcggaggatactaatttttaattagtcttcacaaatgtaaactaaaaaaacattgaagatacttatgtatcgaaacaaataaaaaaggagcgactatgctccttttttatttgttttaatgcgtattcttattatatttcgggaacgtaatcgttaaagtcgttcctttactaacgatacttcgaatttttaaacttccatgcatcgtctcaataatcttaacagcaaccatcgtacctaaaccggttccttttgtttttgtactaaaatacggttcaccgaatcgatgtatttgctcctgtgacattccaactccgctatcttcaattcgtatttcaactttactattattgatagatgaggaaatatttaaggtaccaccattaggcattgcttcaatactgttctttattaagtttaaaaaacattgttgaaagtgctgtttattaccaacaatggttgcctcagaaaaatcctgtgtaatatgtatcgtattcatattacacaatggcaatatcatattaataacccgatttaactcttgttttattgaaatttgatctaatttttctggagcaggtttggcaaacgttaaataatcatcgataatttcttgggcacgatttaactcttcaagtatatgtttaatatattcgtctcttgactcaggagttaaatttggtgtttttaaaagctgtgtaaatccttttacaaccgttaagggattccttacttcgtgcgatatacttgcagcgagttggctaacaatctccattttttccattttaattaattttgagcgcattaatacagcatcttttataacttcatttatataaacaataaataacatcaaagtagtcggtaataccatgaaataaataatatacaaattattcacttcaaaatctgataaagttaatacaattaaagttgtaaatatggctaggaaaaaggttaaaaacatggaaaaagctactttaagttttctattatatgtattaaattttgaagatgcgagtgctgtaacgatgaacattattccgtaaacaacaacggtcagcatgttaaagccataaaataaaaatcttgtaattaataaaattgtaaacaatatgataccgacagggaatccaccataaagcgtacctattatgaccggaatttgtcttaaatcatgaatacaactttcatccatatagatagggtatcgcatacataaaataagcgggatactagaacaaagggtaatcagtagtattttatatttctttaaatagcgcccgctatcatatatgaaataaaaaacaaatatactacataaaatgtatagaagattatttaatacgttttgattaatataaacaaagtccataatatttgcctcgttattctgaatttacttaacatatgtattatacataataacatatgttaaggtgaataaaccttgttaatacaagatttgtttggctttttgttataaaatgcaaacatttttcaaacgttagctatccaaagatacttttactaaaattttttactccttcttcctgcatgttcggtaaaacatgagaataaatcctaagagttaatgaaatgtctgtatgacctaatctctcactgataattttaggattaactccttgtttcaatagtatagttgcgtgtggatgtcttaaattacgaattttaatttttttcactgctgcattttttatttccttataaaacttttccctgaaagcatttctgcataaccccccacctgatttattacaattaattaaatctaaatcttgataagcagaactgattggtaataagaaacgtttgcatgagattctaaataaatataaaaatactaaaggaaagtaaggtatgaaaaaacaggtgtttcaagaaaagtggacgagctaggtcgtgtagtaattccagtaagagtttatttgggaggtggcttttaaaactgatgttgttgagtacatgtggtagtaaaaggtagatggacatatgaaaaaagtagaaattgatgttagtagcaacaaacttttaatagtgcaggacgggaatgtgacagtagtcaatccaccaatgagcggatttggtgagcaagtcgcggtttagataaacggtaaggttgatcgtgtagatactaagtttactgaaaagataaaatgattatttttagaaagatacccagacggatttagtcgagaagctagtcaaaatcgcgtagatgtgaagtgaaaatcgtaaaaaaaaagagtcatgagtggaaaggctcatagctctttgaataagggtaatggttttataggtgaatattattattaaattctaaaaaattcaatgttagtaaattaattggtatgtgatttgagttttatagaaagagatcagctaacaacagctagctgatctgcaggttctgtaagacaaaacagaaaagaatattaacagaatatagaggtttattctggttgtttgaacgtagttaaagaaagaatatcacatactatcaattttaataaaaactatctgtggctttcacttctttattttattcacaaatagttccagtagctattccggttggagcgacacctactgggacattagtgataacagtattcgtagcaatatcaataacggaaacagtattactagcttgatttgtaacatatgctcgagtgccatcaggtatgatggctacttgatcaggggataaaccaacagaaattgtatcaatcacagtatttgtcgccacatttattaccgatacattattgctaactttatttacaacgtaaataaggtttccacccggtgtaatatctatgccaacaggttcggtacctacgttaattgtattaataactgcattggtagcggtgttaataacagaaaccgtattgctgttttgattcgtgacatacgcacgagtaccatctagtgtaaacacgattattctaggacgaatgccaacagggatggtatcaataactgtgttggtagcagtattaatgacagaaattgtgttgcttaattcgtttgcaacatatgcaagggcaccatttggggaaacagtaattccttgtggagcgatgccaacaggaatggtattaataactgtgtttgttgccgcattaatgacagaaacagtattattgccatgatttccaacataaacagttgtgttatttggagaaacagctacacctattgggttagttccaacaggaatggtagcgataacggcattagtagcagtatcaataacggaaacggtattagaaaaaatattagtaacataggcacgagctccatttggtgaaacggttacttcaagtggtgcattacctacagtaattgtatcaactactatatttgttccggtgttaattacagatactgtatcatttgtagggtcatctatgagtcctgcatttgtagcatatactaggaaattacatgcaggtccggttggcccggtaggtccggtaggtccagtcggtcccggtggacaatcacaatctccattaggtcctggtggtccttcaggtccttgaataccttgcacaccttgaggtccagtaggtcccggtggtccttccggcccttgaatacctgacacaccttgaggtccagtggttcccggtggtccttccggcccttgaatacctggcacaccctgaggtccagtggatccttccggcccttccggtccttgaattccttgtacaccttgaggtccagtgggtcccggtggtccgggaattcccattccggtccctgaaccagtaggtcccggtggtcccggaggcccttgaatcccttgtacgccttgaagtccttgaggtcccggtggtccttccggcccctgaatccctggcacgccttgagatccttccggtccttccggcccttccggtccctgaatcccttgcacaccttgaggtccttccggtccttctggtccttccggcccctgaattccttgcacaccttgagaaccctgagcgcctctaggtccaggaaatcctctaggtccagtggctccagtcggccccggtattccgatgttacttaatagcgaactatttaagattccttgtaaaattaagttgaatgtttgctgtaataaggggtccgatatatttgaacaacttataagtgaagacaagctttggaatagaaattggaataatgctgagatttgagtgagggatgcagtaggtaaggaattaattaattgatttatagttcttataactaaatttctatttggtgtatttggttgtactgttattaataaatcatttaatgcctgtaatgctgattggagtatttgtatagttgttggatttggtgttgtgaaaaaagaaaggatggcttgatttaattgatttattatttgtaataattcttgttgttgagaattcgagaaaaaaacaggtgtacagcaattactttgatcacaaggggatatagaaataaagcagggttgctgaaatttatcacacggatttttggaatttgattttcgattatatctcataaatacctccttttaaaaattgaatattaagtaatttttggtaaattattagcaactgactttgtaggtatatgtttaatgtgaaatgttttttccttcaaagtatatgccaataaaatagaggtgttcatatgggatatataaccaatacttggttgttaggaggatgttgtaatcataggaaagaaaatgaaggttacaaagtttataggcaagcgattgtattttaaaaaagcgttattgtaataaaatttgaagtttattaaaaagaaggaatgaaggaagatgtaaaagattttgaaagatccataaaaagaattcagtaaaacactgaattcttttacacgtatttttatttgttaatccatttagaaataataggaatttgttgtgcctattaaaatatgtactgttggtaattataacatgaaaatggattgtaatagaataatgcataaaaaagaacaagtaataaattaaacaaaagctttattttattatagataaataggtgactcagcaattgtgctagccgagtcacctagtactatggaaccaaataatgttctttttctatatgtagttatgtggagttcttagaggctagcccaatagacagttaagggataaataaaatcattttagagagttttacattttattatgttaatgctacaacagcaagagttaagcccaatgtatttaatgtattagaatatggtcctacattaacagtaagagtacttgttatacctaaaggtgtagtgaaaatagcgggtgctgatacagaagtgaatcctgcagtatatcccagagaagtaccagagccaatgattggattattattaagatacatagtgatacctgccgaattacctcctggttgaatgataacttgcacttcatagattgccaaataggttcttccaccttcaagtaaaacagttgttggtggtgtgaatgagattgccgtaccattagaatttaccacggtatctagtggaatcgcagaatttacagagactattgatggggtagtttgaacaacatttaaactgttagccgtgggggatggacaagtgcaaggtttgtgaatgttagggttattatcattttggtaattcacaaataatcaagctcctttgcgtaagataattttttatcctatataaaacgtagcttttttgtatctaagttatttttaaagagaagttgaatattgttggtcagttaacttttaaaagcatttgatactctgggatttaaaagtgcatctgataaatatatatgaatgttttttaaggacattactgtaagtttggaaacataataaaatcgttatttgaaactgttcatgaaaaaagagcaccatcgaaagtgctcttagaaaatacattttatattctgttttgagctacgattttaatattctctggtggaatgatatcttgaattttttcttttaaatctacttggaccatttcttcaagatgttcaagtgaaacttcaaagtttatacattccgcagatgcgatgcttaataaagaataattttcattctttttaacgacaagatattgcgattgatctgttattactatacacccttgttgaatgcctaatttacgatcgtcttcaaaagtcataaatgtttctccttttatatgtattgccgataaatagtttactacataaatacattggctcatattgagaaaccttacattagtattacaatttcatacggtttctgaatatcttatgggctagtaatacggagagtgtaagaaggttcaattgaatatttaacaaaatccttatttgaaaacaagaagccctagagttagggctctagggcttcttgttttggtattctcacatggtttttcaaaaagaatagaacatattgaagataacatgtgaatgtttcataaatgtatcaaacaagtgaacaaaattgttattgtagaagtagtagaaatgaagtttctattagttaagtgcgtaaaaggtattatttccagtagataaaatgcgcatggggcacctaatcattattataccagaggaaaagaatatgttatgaacttcggtgaatgaaaaaatgaatatttcactttaagcgaagttaatgaaaataaaaacttcattttagtaggtgaggaggatgaatgatggttgtagaagcaaaggtgaaatttgaattagatgaagaacaaaaattacagtttcaaaatataagagaaaatgaaggggaacaagaagcgttttactttctagaagaattgataatgaaagagattaatttagctgaatttttggagatggagtataaggataaagaatagcatttcagtcaaatcaaaagggggaacctgtgatggaagtagtggaaatcgaaggccagttatcaatatttgatataggttaaacaaaatttaaactgtacgaagtcttagaagcgaaatacctagaacatcataacaaatatagttgactatgtttgtcaaattttgttggattctttagaaaagtagtattgcagagagaaacacaatgatttggaaaagattattatacgggacttattaagagaatgtaggaattgataaagcttaacaaaatagttattttgcataaaaaaacaggagtgcgtgaccaaagcactccatgtcgctaatgacaacacctataaaagtatatgaatgattttcataaatatgttgttaaaacttgaaacaaaatagttagttatttgaatagaaagagattcaagaattataaggtgaaaagcgtcatgtattatccattgtaattaaatattcatagtatgaaagatggaagacaaaatatttaaaggatgaggtgaatataggatgttttttgattttttttataataaaacgcaaatgcgccctttaggaggatcggggcctgcacaaagtactattcaagcagttcatcaggctatacaagcacaacaacaagcgctgcaatcacagcacacgcaacaaagttataccccagcacaatcatattattctttacaaccttataccccagcacaatcatattattctttacaaccttataccccagcacaatcatattattctttacaaccttataccccagcacaatcatattattctttacaaccttataccccagcacaatcatattattctttacaaccttataccccagcacaatcatattattctttacaaccttattacccagcacaatcgtattacccaatgtagattatccagaatagaatattctttttattgatttcgtatgaaactatatatttttatagtaataaaaataataaagtggatttaaataaaaaagggtacacatataagtgtgcatttagattaacaggattgaacgtatggactggattgccctatacaatatgcttgtctaattagaaggtgaagtttttttataatatcaacggaaaatcaacaaaaacgctatagtagtaaataaataaaaaaggacctgctgtgggagaacaggtccgttacaaaaatgcctatgaggaaaatcaatgtcaccaatatagtatcaataaacgagaattcatttcaggtgctaagtattgagaaataaaaaatatttggcgcaacaaagtggtcaactttattagctaaccacctgttacacaaaagaaaattaggccctgcaagttaggatgtgtaacttaaagttacagttatagtgtaagccagatttgaaatgttatacgaaagttattttgataaaaacctcattttgtagaaataaggaaaataaaaaaagtactatgcataagtgctctttaagaaaggaggtaactctttaagcggaacgttcaggttagaaatatatgatgtgaaaaggaaatgagaacaaaatttcattttagatttaatacaaaagagcagctagcaaaagctaaccgctcttcagaaaaacattaagaaggaagttcagaactcaagtgtatttatagtatggacataatttgaaggtctattcagaaaaaaattataaagagcaaccactcaggttgctctacagataggagataactcagtgaacaaaatgaacacgttaaaaatgtatgtaacaaatagaaaaataagaacaaaaaagcagctagcaaaagctaactgccctggtgaataagaagaacacaatggtcattcgtattcaaccttggtgtacttatattgttaacactttttagaaatttattcaataaaagagcagctagcaagagctaactgctcgactctcgaccaagagagctagagtgggaagaatttaaagctgactttttaaagtcgtatatagtatcggtgaaatttagagatttattcgtgtaaagcataaaaagagcagctagtaaaagctagctgctaagccttcgggtatgaaggggaatcagaaactgtatatacattattaacggaatgttgtgttttattcagtagtagcctaatttgctactacttgatcttgatctgcaacatcagaatcaaatgtattcgttgcactaacaccattaaaattattaacgataaaagcggcattggaaccgcccgagccattataagattttgtatttgcttttggagaaacgttataaaaatcacctaagttgaaagaaccgttactggtttgtaagacaaggtttccaagaatagctggcatagctttcacctactttcttagggagtatttaaattagtatatggtgtatgtgtctagaggttcatttgaaacggagaattttgaaatgaagtttgattgaaaactcaataaaataatcacttgaatagaaagcgagttaaaagaatagaaaaagaacgcccaggaaagcgttccttgatcaagactcatatcgaaaaaacgaaaatgtgacagcgatatatattatttaagttttgagtgtatgtgcaagtttaaaacaaaatccttatttgaacagaaaaaaagaccgcatgggaaagcgctctttgaccaagatatattaaaaagtatcggcaattaaattttatgtatattttcagtttatgtgcaagtctgaataaaatctttattttatcaatttataggttgatacagttccccaaacgaaaagaaccaagtaaaaaagtctttgtagtagacctgcaggtaaggggaaaagaaaaacaagtgagataaggatagttattactattaagcttagtaaacagaaatatgtccattttctagtttttttaagattcttagcaaaaataaatagtcctggaaataccgtaagcatgcctatccaaactagaatggaatgtccaattaggtttacatctgcaggaattaatcctgaaactatagtagagattcctattataagtataaaaaatgttgctattctattaattcttgttttttctagatgttgtgaaatatatagtactccaatacaaaatgttattccattaacaataaagagtatattcatcccaaaatgattaggggagcatatttcatacggagctatttcgtaggtgaattctccgcaggttgttacacctagatcactcattgcatgatgcaaatagttataaggtgctgtagaagtgaaaataaagaaaggttcaattaaaaagtatagacaagttgcaatccagctaaataagccaattttatttgatatatacattagatacctcctttgaaaaaagtatatttccattataggtggttacatcatcaaaagtaaaaattttcaagttgaaagtcgataactctgttcaataacataggattttctagaaaaatgtgattagcggaaagacgtataaaaaatggatggggcagaacctaacaaaatagttatttgaattagttttattaataaaaagagcacacttgtatatgtgctctcaataaggtagatgaatgtctcatgaaacagaaaaatcccaaaagttgtaatcagattttcatgagtaaatttttaatattgtattccttatgtgaatttatggagcctgtcattaaagaaacgatacgagttggagttttaacccaaacgatatttcataataagcgaaaaggagcacacatataagcatgctctttaataagaaaggtagatctctatgagcgcagagactacatacaatatccatatgtttgtttcttttaaatgtgaagaaaaaatcaacaaaaggtcaatgtaaactcaataaaaattcaacaaaaacgctattttattagactgcgagatggtgatatgagtcttacttttatagagatatttgtaggtcgtgagagtagtaccttcacgacctacaatatccctaattcctttaatggcgtttctagttattttaataaaatttcatgttctggttctaaatggattagtatgtgagcacgattaaattgtttcttaatatttttctctatccgatcacataattcatgggcagtttcaatgttatagtgagatgaaacgacaagatgaaaatctatgtattcagttggaccagaacgtcttgaacgaaaatcatgaaactcaatatattcatctctataagattctataatttttatgattttttgttcctctactggtaataaacgtgcatcaattaatgggggaaaggacttcttcattaattcgaaggcttcagtcatgatataaacagctaaaataattccaatgattgggtctaggaaataccattctgttatactaactaaaagtaagctgattgcaacacctaaagaagtgtatacatcagtgagtaaatgtagtgcattagatttcattgcaatagaatttgttttttcagcagttctgttaacaattcgtgatactacaaaattgatgagtgctccaatcaacataacaactattcctaaaaatgggagatgaatgggttcggggtgtatcaatttaagggtacattcataaataatccaaaaaccagctataaaaattaataatgtttcgattgttccagaaatattttctacttttccatgtccatagggatgtaatttatccgccggtttatttgaaattcggacagaaaagaaagcgatgattgaagctaataaatctaaagaggaatgaattgcttcggaaagaatagctactgaaccagtaaaaataccaataacaacttttaaaatgacgataaaagtgttacttaatactgacgaaaaagctacttttgatgaattcattgttacatatcccccctaccttttattaattattttttatgttatcagttcaatatacagtgggtctatagcaatctttttgcaaaagacaataaaaattgaaaaggtttcaatatgtttcccgtgggcatatttaattgttaaccaaaaaattgaaatataagttaataaaatgaattaaagacagggaataagaggtgcctagtgcttttgataagttatcttcggtgcaaaactaaaagcagctagcaaaagctagctgctaagccttcgggtatgaagggaaatcagaaactgtatatacattattaacggtatattgggttttattcaggtgtagagggaaataaataaatttaggctgttccaacttggctttggtcggcaacatcagaatcaaatgtgtttgttgcactaacaccgttaaatgtattaagaacaaaagcgacattagatgaacccgaaccattataagcttttgtattttcttttggagaaacgttataaaaatcacctaagttgaaagaaccgttactattttgtacaaccatatttccgacaatagatggcatagctttcaccttctttcttagggagtatttatattagtatatggtgtatgtgtctagaggttcatttaagtttgaaaattcaaagatatagcttgtgaaaaacttaataaaataatccttttgtttatagaaaaacaagctaccacgtttcattgattgtgaatcttttctaaggtgtgcttaaggggatgggaataaaaagaatattttcgagaggaaagggattaatttatgttaggaaattagtttgataaattaaaagaacctaaatgtatacatagatataaacttaataaaagttatgacaatgaagattttagaactggtaagatggggatagttagttattataaatgtgaaaagtgtgggaaagagaaggaaatcagcaaatatactaatgatgttaatagtgactattgggatgtttaaaataacattcgaatatagtccggctagaaaactagagaacaccaattcattaaagtagcaattaaagctgttttaggaataggtgtcctttttatttcgttttaaaattagaacacaataatatgaaatgctcataaaatcattcttgctatacatgataatagtataaactctatatttcttttaataatttagggttatatcttttctgcatcagccgcttttaaccacgcttcgtagaattctgtaactgatgcataccgttctgcccgattgtcatttacagcacgatacgctacctcatataattccttacttgcttcccattttataaaagaacgatctttttcaccgcctaagagtgagaaagccattgctcccatattaaatacatttgttctttcatcaattatagcgtttagttcaaattcctctggtgacataaaacgggaggaaccccatagccggcccattttatttatgtaaggtttcttactgtataaatctatatcacaaatttttgtttcgtttgtattaaaattatataaaatactaccgtcataaaaatctatcgctacataatttttcttttctacataagtatggaaagaaaaaatggaatgtaaagaatgaattcgttctataacaggtaaatgtctaaatttataaaatggagagtttggatttttatatttctcaggaggtgggaagcgccaatgcgaatgaagacattcaccatcaaaccaatcgaaaattaatacatatccagattgaactggaaaatgatcaattaatcttatgagcgattcatgctttaaatcttcataaatagtaactgaattttttagcctttcaatagcatcacccgttgttccttcatatgcaattgtttgtgctcctgcgtatttgataaatttcttatgcccatttttttctacaccaaaacttatattacctgaatcttgctggtcaaaaactgcaaatacggtacctaatttaataagccaatcaaaattatgatgttcttttaattggaatattacactatttaactgaacttcgacggaattatctttcatagattacctcacatttaatataattaagttgtacattccactattcgacatattttgtggaaatcctatgctaacaacataaaattttataaatataatgataaacacttatagagaggtgagtacaatggaccaacaaattgttattaaaccgtatcaaaaagactgggttgaagagtatataaaagaagaagagaagttctgttccttgttaggacaagaaataatcgctgttgaacatatagggagcacagcagtagaaggattaggagctaaacctcttattgatatgatgattggcgtaacagacttacaaattactgaaaactggattgagattctatcggaaattggatatgagtatgttccaaaagatgcaaccaattggcgtttttttagaaagggaaaatggagagcaggtactcatcatttgcatgtttatatttataatagtgacgagtggagaaacaatattttatttcgcgactttctaataagccataaatgggcacgtaaagaatatagagaattaaaagagaggcttgctattacatatgcttttgatcgtgtttcatatacaaaggcaaaagcgccgtttattcaaaacataataaagttagctgaaaaaaatcaataatagttgtcagtgatattgaaattctcattttattttaatctttctctcattttattttcttttttatttgatagactgcttgttacaaagcctttattagtaaggagattaaataaaatggagaagatattaagaaataaatatttccatgtgtgtgttaaaattataggtattactattattatttgtagtgtagagatgctatttattaatgttatgtacggcaatgttctgaatgtaaaatggttaaataaaaaattaggctcttttggtgaatatggggctattatcgctgcttcattatggtttttacgccatatatggatgtttttaaagaagaaaaatatacaagggtttaaaaaagttaaagaagtgtatctatttgcaaaaaagtttcatgtattaattggatacgctataatagctgttgcaattactcatggtgtttacttttttataaaagggagtcgtcatattttactcatatacagtggtatattttctctattagccttaattgtactaggggtttttgggttttctttacagcaagtaaataaaaaagaaaaatttatgatgtatagaaaagtgcatcaaatcattgtaattatatttggaataggattatttattcatttaattgtctaggaggaactatcgttgcaacacattttaattattgaggatgaggaaagtttagcagattttctagaattagaactaaaatatgaagggtataaagtagatatacaactagatggaagaaaagggttaagcgaagcacttgaaaagaattacgatctcattttgcttgatttaatgctgcctggattaaatggactagaggtatgtcgtcgactaagagcgactaaaaatacacccattattatgctgactgctcgtgatagtattatggaccgtgtgacaggtttagatagtggagcggatgattatcttccgaaaccatttgcaattgaagaactgttagcacgtatgagagtgatatttagaagagaagaacatattgaaaacaagcaggtttcatttcttacattcaaagatttgcagcttcagattgaatctcgaactataactaaaggagatgaagaaattgaacttacaaataaagaattcgagttattgcttatgtttatgaaaaatattaatcgcgtacttactcgtgatgttttactggatcaagtatggggatatgatgcaattgttgagacaaatattgttgatgtatatgttcgttatttgcgaaataagttacatagtgtagataaggaggagtatatccaaacagtgcgtggtgcgggatatataatgaaatgataaaaaatattatgtttcgaattcgaaatctacctataaagtggaaactaacactttggtccactacactagtatttattttattcatcttatatagtgctttgcagtttattgtaattaataagtggactatagattatgaacagaaacaaataaataggcaagttacggaaatagcggcatatttccaagataaaaatgataccctttcgagtaaaacatttaaaaacagtaaagattttctaaacaatatgattgataagcatcaaatgattcgtattattgacatggatggggagccgattattactgtttcacgagattttaatgaaacgtggataaagccgaaacaggttataaaagatgagtcatttataaaaaggcatttagaagatcgaatattagttaagcgcataccaattaaaacgaaagagtttactggaactattgaacttacgaaaaacctagagacatttgattatttattaaaagttattttagtggtaatgcttattgctggaatatttggattgatatttagttttttaggtgggattcttataactaagaaactattatcaagtgttcaaaatataacagatacgatgaaacgtattaaaaagaatggactaaatgaacgggttccagtacgagaaaataatgatgagcttgcaaaattatcatttctctttaacgagatgatggatgaagtagaaacttcttttacacaacagaaacagtttgtcgaagacgcatctcatgaactaagaacaccgttaacaattattcatggtcacttagcgatgttaaaccgatgggggaaaaatgatccagcagtattagataaatctcttcaatctagtttaaaggaagtagttcgtttaaataaattagtttcagaattgctagaactatcaagagctgaatctgaacaattgcatccaatagcagctgagccagttcatgtaaatagcgtattaaaacatgttacacaaaactttgtagtactccaaagtaattttcaatttgatatgaaattcggggatgacgaggcttatgtgtcaatgccatcatcttacttagaacaaattattattatcataatggataatgcagttaagtatacaaaagaggttaataaatatatttgcatagaatccagtttacactcagggaaagttacaattcgtgtaatagatcatggagcgggaatacctgaatccgatttaccatttgttcttaatcggttttaccgagttgacaaagcgagaagtcgaaaacaaggtggaaacggactaggtttgtctattgcaaaacgacttgtagaaaaatataacggagctattaaaatagagagtaaagaaaatgaaggaacaatcgttacgattacattaccatgtataataaaataagccttcaaagaaggggtgcttcttgcattccttctttttttacgatcaaatcattttgtttatttcgaaatttctagtacattaaaattattaagggggaataataatgaaagctatcgtacatcaatataaaactggatttgacggtgtagaatataaaatatcacctgagagagcacttaatgatggggaagttaaagtgaagttaaaatcagcaggcttaaatcatcgggatttatttattatgaataatagaaaagaaatgcaattgcctttaatcttaggatcagatggtgcaggtattgttacggaaattggaaacggtgtttctgataacatattacatacagaagttattattaatcctagtattggatgggaacatgctactgaagtaccggagttaccggaagtgctaggtggaccgaaagatggaacgtttgctgaatatgtaattgtaccagctgaaaatgtagtagaaaggccgtcatatcttacttgggaagaatcaggtgttttatctttatccgcattaactgcatatagagcgctttttacaaaagggagattgaagtgcggcgaacacgttttaattccgggaataggcggtggtgttgctacatttgccatgttattcgcgaaagcaattggcgcaaaagtgagtgttacttcaagggtagagaataaaagggaacttgctgcaaaatatggtgcagatatttcttttcatagtgccggaaattgggaagagggcttacaaggtgaaaaagtagatttaataatagatagtataggtccagcaacttttttgaaatattttgatgtattaaaaccaaacggaagaatcgtgaattttggtgcaagctcaggagataaaattgaattaccattacgcgcgctattttacaatcaaattgatattatgggaacatccatgggtagccgtgaggaatttaatgagatgataaagtttatagaaaaatatcaaattaaaccaattattgacaaagtttactcgttagaagaagcaattcgagcactaagccgtatggaacatggagaacaatttggaaatattgtacttcaaatgaattaaaaaatatgattttgcaattagtatatttaaatgaatatgttatgtattccaaacatgaaaaaaaaacgaatcgccttattataaaggtttacgaactttatacataaatagcgtataaaatttgttttataattgtcacatgagtaatagtaaaatgagaattagatgagaaaagtttaagcccattttcataatggtattgtatactgtgtaaatcaagaacacttgtaagtagggagagagtattatgaattacacagtatttcagtggtttaataattttgctgattcatccaaactattagatacgataatggttgcaattacaaatagcgctgcatacgtagccattttatttatgcttatcttatggtttaataatggaaagaaagagaatgcaattagaaaacaatatacagttttatatacgacgctttcggttattattgcattagtagtaaatgttcttatacatgcggtatattaccatccgcgtccgttcgtatcacatgatgtacatcaattagtaccacatgcagcagattcatcatttgttagtgatcattctgtacttgtattttcaatcgccttcgtatttattcttagaggagaaaaactgaaatatatcgcgctattatgggctgtgttagtcggtatatcacgtatgtacgtaggtgttcattatcctttagatatacttggtgcagcattcttaacacttgttacgagcggtttagtaatgcaaagtacacgtatgtttgaaccaatagcgaaatttgtattcaaaatgtatgcattagtagcgagacgaattcctttcttagcaaaatataaccatatcgcataattttcttataaaaagttcccatttggaaatccagatgggaactttttatagtaaataagaaaagagtttagagtgctatgcaatcaagttttggtgaagttaatattcagaaatttcacgcaccgtattttaattaaataaaacaaaaaataacaatagttagttttgcattgttttaaaggaattaaaaagaaaacttcgaaacatatagtatcgtaaacaaaaactacaaattttaaaacgtatcttcgtacgaatccattccaaaagagaggagataagtatgcaaaaacttcaaacgaataaaggcgctcgatatatgatgattgcttttattgttttgtttcttattatgattttgcgtatattctatattcaggcagtaggagtcgtgcataatgtaaatgtaaaggacctcgcggatgaacaacataataaaaaaggtgttttagaagcgaatcgtggtactatctatgaccaaacgggaaaggtgttagtacaagattctacaacgtatcgagttgttgtgaatttaaaaggaaaagataaagtgaaaaataaagatgaaaccgcacaacaattagccgatgtacttgaaattgataaagaagaagtattaaaaaactttcatgaggggcgtacgcaagttgaaattggaaaaattggtcggaacttatctagggaaacgaaggaaaaaattaatgatttaaaaataccaggtgtatcttttatgtcggaaaaagcaagagtgtatccgaatgaagattttgcatcctatatactgggttttgctagaccagatgataaagggaatacggaaggaaagtttgggcttgaaaagagtttggataaatatttgcgctctacaaacgggaatatagaatatgtgggaacacgaagagggattccacttacgaatgatataggaaaagtagaacctgctaaaaatgggaataacgtatatttaacgcttgataaacaaattaatagctttttagaagaagcgatgaacaaagcacaagagcattatgatccttctatgttaattggcattattgctgatccaaaaacaggaaaggttttagcgatgtctagtaaaccgagttacaatcctaatgtaggtgatatcgaatactttttaaatgatccgattgcaaatgcatatgaaccaggttcaacaatgaaagtttttacgttagcagctgccattaatgaaggtgtatataacggaaaagagtattttcaatctgggaaatattccgttggttcatctgatataaaagaccataatggtggatttggatggggatctattacatttgatgaaggttttgaaaggtcatcaaacgtagctttttctattttagaagatcagttactgaagccaaataaatttaagcaatatatgaataaatttggattcaatcaaaaaacaggaatagatttacctggtgaaagtaaaaatactttattattaaatacgcaaattcaacaggttacaacttctttcggccaaggttctacagtaactccgattcaattaatccaagcggctactgctatagcaaatgacgggaaaatgatgcaaccatatattgttgataaagttgtaaatccaacaaacaaagaagttattatggaaaatcaaccgaaagaaattgggaatccgataaaaaaagaaacggcggacaaagttagaagcttaatggagcgtgtcataacatcttcaaaaggaactggtacaatgtataaagtggatggttatccaattggaggtaaaacaggaacagcacaaatcccgaatcctgaaaacggccgatatatggaagggaaagagaattacattttctcctttttaggaatggctccaattgatgatccggagttaatcgtatacttagctattaagcagccaaagttaaaaggagatgagtatggagctcagcctcttgctgaaatatttaaacctgttataaaaaacagccttgaatatttaaaggtgaaaccgtatacagaaaaacaaatagctgatgcaacgaagcaatctcaattaaaagtacaaaattatgtaaatcaatcgatgggtacagcagagaaaagtgtagaaaaagagaagatacagccaataattttaggagaaggaaaaacaataaaacaatatccacagtctggcgaggtaatgagtgaaggggatcgtatatttttattagggaataacgcacaaatgccaaatttaaaaggttggtccatgcgtgatgttatgtatttctctaagcttttgaaattagatttgaaaacatctggtacgggttatgtaacgagccaaagtattgaaaaaggacaaagtttacaagaaggagatacactagaactagaattagaaccgccgttacaaccgttaacagaggcgaatacgaattaattcaggtatttggaaggagctagatgcaaatggctctttctttagagctgtaagtaatttcacgcaccgtaatttttagaaaaaacaataaataaatgaattaacagagacacatcattaaatgtctgattattttttatttacagttaaaaacaattgtgataatatggaaaaaattaaatgcagtgaagagaagagtaaataaaatgaatttttcacagagagctccatttagctgaaaaggagtaaaaattctttattgaaccaagcctctgagcagcgcatcggaacctattattagaggatggtgtgacgggagctcccgttatagagctatggtataagcatgagttagaatgcagtacctgataaggttaatatggtgacatattaacaaactagggtggcaccgcgatgataaatctcgtccctaagattaaaagtcttgggggtgggatttttttattgttttaaaacaatttggaaagcgggggccaaaaatgaaaaactttcttaaagattggaaatatcctttactattactgtccggtgttggtattgcgaatttaggggcatggatttacttaatagcattgaatgtacttgtctatcatatgggcggctcagccttagctgttgctactttatatgtaataaaacccttagccactttatttacaaacgcttggtctgggagtatgattgatcgtttaaataaacggaagttaatgattcacctcgatatatatcgggcgttatttatcgctattttacctttacttccgtcactttggattgtttatgtattcgtattctttataagtatggccagtgcaatttatgagccaactgctatgacgtatatgacgaaattaattccagtagaacaaagacaacgtttcaactcattacgtagtttaataggatctggtgcatctttaattggtccggcgatagcaggggttttattaattgcgagtacaccagattttgctatatatataaatgctatagcatttcttttatcaggattcattacattacttttaccgaatcttgataagaaaaaagattcggatacaactagtaatacattatcccttacagtattaaaaaaagattggatcactgttataaattttagtagaaaacatgtgtatgtcgtatgcgtgtacttcttatttcaaagtatgttcgtattagcaaccgctactgattcacttgaactatcgtttgcaaaagaggtattactactaacagatagtgaatatggttttctagttagtatagctggtgcaggatttattttaggtgccataacaaatacaattttgtcaaagaaattagcaccttcacttctaattggaataggatcattattcattgcaattggttatttaatttatgctttttcaaatgtatttttaatagctgctattggattctttattttatctttttcaatggcatatgcaaatacaggattttatacattttaccaaaataatatccctgttcatatgatgggacggattgggagtatatatggacttgttattgcgatagtaacaatctttattacaatattatctggtgttgcgactcagttcatttctatacaacttgtagttattgtaggttcattgattatgttatttattactatcgtcttgtgtgtgtttactttattcccatcacaatctaagttgtattctactgaatcaataaagtgaaactttaatcagggggcatccccccactgattatcagccctcaccaatcgagcttttacgggcagcagggtccccacttaacttctttgctttcgctgaattttgagatgggggtcttactgtccacaaatagcgggataaattcgaaatgaactttgtgttctcattaacaatttatcgtatttaataaaagggttctttcccctttatatggaaaaatcaataaggggaaagaacaataccgaaagataagggtggttgtcgtgataaaaacaaaagatgaaattgataaaattgtaaaagaaatacaaaagaaaatagatttctctggagtagttttagtaaaaaaagaaaaagacttagtctatgaaaaagctttgggttacgcaaaccaaagtgaatgtataaacaatacgatacaaacaagatttggcattgcctcaggatgtaaaattttcactgcaattggcatctgtcaacttgttgaaaaaggttttatttcttttcatacaaaattaaaagattgtctagagataaaattttcaaacttcgatgaagatattacaatacatcaactactaacgcatagcgctggtataccagattattttgatgaaagtattatggataacttcgaagatctttggaaacaaacacctatgtatctattaaagagtttaaaagactttttaccattattccaaaaaagtaatatgatgtttgcacctggaactaagtttcactacaacaatgcaggttttatcatacttggattaataatagaagaacagacgggacttaaatttacggagtatatagaaaagaacatttttaatccgattggcatgaatgattctggctatttttcgttagatagattaccaagacatacagctctaggatatataaaggacgaaaccaaccaaaattggagaacaaacgcctactctataccgataaaaggaggagctgatggaggtgcatatgttactgcaccagacatgctgaaattttgggcggccctatttaataatgaaattttaggaaaggaatatacaaaattacttttaactcctcacattcaagtaaatgataaacagtcctacggctatggaatatggattgaaacacgagaaaacaaggtattcaaatatcatgtaatgggatatgatccaggcgtcagttttcgctcggctatatatccagaattaggaataactttagttattacgtcgaataaaggggcaggacctgaaaaattaatgatagaaatagaaagagctttttaattatatggatttaaaagaagagatacgaaaataatttaaacgggttcatgattgtttctgttttgaaaaatattttagttaacgaggaaccctttatttattaaataaggtttttttgtaattctgtacaattatatataattatatggatttttaaattagaaaacattactatatagttgtaaatttttattattaattcatatgaaaggatgtgttaacaatttgtatatgattaacggtagtgtgtttattattttaggagttatttgttatttaattgtacgtggaatattaattagtaccaaaaatacaaaacatgtaatttggtggaaagaaataataagttttttatttgtgatctacatttgtatggttgttgcagtaactttattccctttaccaatcggttttccttttaatattgaaaatctgaatcgctcggtcaatataataccatttgcatcaattattaaagacatcaatcaaattggtagtgcttatgatggagataccctatttatgattggtctaattgtaagaaatgtaggcgggaatattttattattaatgcctttaggatttttagcaccaatcctatgggataaatataagaaattcaaaaatacaattttattaggattttctatatcagctagtattgaattgctacaattaattgagtctttatttagtggagtgggacgtattactgatattgatgatgtgatctgtaatgttataggttctattgttggatattgtatttatattatctttttaaaagctattaataaatttaacattcgagtgttgggtaaagctaattctaaaggtgtggaattagttgataaataggagtttaaacgagttattaaaggcgtacgagtaaaaagtacgtctttttatttttataaataatgcttaaggctgatgagaaatcacatttttcatcttacacttgaaagtagctatggtatttcaagtatggaatgaaaagaggagaatataatctttaaagataaacaagtttataggaggattctaaatggatattttacttgttattcttattattgttttgatgcaaagtaaagaacgaaaagtgaaaataaaccgtatttggctcattccggctttgttgtgttttgtaacagttcaatccattattcatatgggacaaataactttgctgcaaggactactgtttgttgtaatgcttggaattggcttatgtcttgggattatacggggaagagctttaacatttcgattagatagtgaaacaggtcatgtactacgaaaaggaaattgggtaagtacaataatccttcttgttattttaggagcaaaaattatgattaaacaaagtatgttttcgggtagtacgcaccagacattaatggttgtaacaaatgcctttttatgtattacattaggcactgtgattagtagacgttattatatttggaaaaaatataatgaattaacacaaaaagcgtaaatacattcatcccttgtttaacattgctaagaacggtaatactaattaacattgaacttttacaacaagggatgataatatgatatacatttacacagattttggtggaacacatactacctcactagctgcagcgtatcatttaaataaattaccaacggatcgcaagttaacgaaagaagaaattttgaatgtagattactttaataaattgaaaacagaagatatgggaaaaattatttttcatggcatagatgaacatggtcatcctgtatatacgattggatgcggcgcatcaaaagttgttgtaccagcgatgaagcatttaggagaaatcttgcaaaaacattatcaaagtcatgaaaagattattttttctaatacatcaccaaccgtacctttaccaatgactttcggtgggctgttttctagaaggttccatatcgattttattggcgtaccgttactcgtatggggagcaaaaatttgctgtgataatatacaaaggcttgttagttatacaaaagaagctggccgattaacgaatgattatgttgtaattttagataatgaaacttttaaatagtatatgataacaagaaaatcgagcaaattccttgattttcttttttatttgtgaaatagacaagaaatagtcacatttaatatacatctactatagccaaaacaataaagtcctgttactattacagggatattctcttttcataacataaatatatagaaaaattagaaaagaggaattgaattaagggaggaacaacatgaagcgtgttgcttggattactgatagtacaactgcgaattttaaaacagaaggagataactttgttatcccaatcgaagttattattgatggaatttcgtacaaagattgtgaagaaggtgtacgtgaaagggtttataatgcgttaaacgaaggtaaaacagtcactacttcacaacctaatattggggaaatggtagagttatttacgaaatgcaaagaagaatatgaagaaggatttgcagttgctattagcggaaaagtaagtggaacctatcaaaatatgaagttagctgcagaaatggcaggttttccattaacggtattagacagtgaaacaacaagttatccaatggatgaactaattagaaaagcgaaatcgttatacaatgatggtatgactttacaagatatacacaaaacattagtagatgaaaaaagaagaccttttcatgtattcccaaagagtttaaaaggtctatatgcaagtggccgtgtaaagggcatgcaatttttacttggaagtttattaagtgttaacttaatattagaagtaaaaggtggagagcttttacttgaaaagaaagttcgtaaaatccaaaaatgtcgagaatatattaaaaatgaacttgaaaaagaattaccaaaagtacttcacatgttccatgctaacgataaagctggagctgaagaatggattgcagatattagacaagcattccctgaaatggatttcaaattatatccattaccaatttcatttgcagttcatgcaggtgaaggtacaatagcaatcagttattaaagtaaaacccgtgaatgattcacgggttttttcagagtgtcgggaaagaccttatatactataaggtcttttgtacctcttaaaatggcttgaatagcgtttatttgaggtcattaggtagttagagattgatgactatctttaacgaaaaaagttgaagtcatatttttcaatgttaataaatcagaatattctttctattatttctgcagttacaatctatttacatataagattattaggattatattgacaatgaaagagaaaacaatagatggaaggggatgtttttatgttaaaaaaagcagcactagggatttcatcgttagcaatcacagcgttcgtcggattagggatggcaacagaagcttcagctggaccagcagcaccacttacttcactaaacgtcgtacaagtagagtctgagctaggcggggtagaaacaattaatcagaacagcttcagcacatcgcgtaaccacgggggaaaatatttatatattacaacgaaagaaatgggctatggccaaaacccatttgctaaaatgaatggttctaatgtaaaaagtattgattccactataattggcggaagaccaatcgttggctggtattataaatgggatgcttctggacaccaacaaggaacttttgagtaccaaaagacatctataaatgcaccatttaatacaatgcgtacatcgatttatatccaataattttgaaagcgttcgcacatatagaatagtaaaaaaggtacttctaggagtacctttttttgatttgaatcacgttcatctatatttacaatcctaatttcacagcaagaatacttcccataaaacaaaatccttaaacgtctataaaattaatatgaacgcgtagtacaagtccgctacagttaaagtacgtaattttacatatttcaactcaatgaaaaaggaagaaactgcagtacttacgccgcagttttaaattcatccatgaactcacagttttttagatatataaacataaacgtactacttgctactcttttttaaattcaagattacaaaaggagtagttaaacttatataagcttagcttaatggggatgtggcggaactttaaaattaattacatctttttcatagcataaataattttgtatagggagatgaaaggatttttttaaataataaagaagtatgtataaacaaatatataaatggtagtgattaggatgaaaatcagtaagtttgcagaagtaaataatgtaagtgtagatacgattagacattatatggacctcggactcgttatttccgagaaaaaaggaagtcactatttttttgacgagtattgtcaaaaggatatagaacttatattagagtacaaatggctagggtttagcttgtatgaaattaaagaactgtttctttataaaaatttagggaaatccttaggctatgaaaaggataatttttatcaatctttatttaaagtaaaatatgaaaagattgaacaagaaataaaaactttagaggaacgaaaatgcaaattaaaggaagcgttacataatttatctatagaaactgaaatttcgagttcaattttaggggtagatttaaaagtacttcatttatttaaatgtgttaagtgtaacggaaatttaattcttgaagatggcattattaataagaatcaaattattgagggaaagttaatttgtaattgtggtgaagaatacacgattatttcaggggttttaacagctggtaactcagtgaaagcgtatgaaaagaaatcacttgaagattctatttcggattatattcatgaaactgatactgcttttttggaaaatgttcaaagaggaggagaatgggcgaaaaagaaactaatgcaattagatttaaatgaaaaaatactacttgatttagggtctggtattgggttctttttacgaaatatttatgaagaactaccggaagagtgtttatatattgctgttgatcgagatttgaataaacttttacttttaaaagatgtaattgagagaagaaatgtgaaaagaaatattgtatttatctgtgccgattttctaaacatacctattcagaattattctattgatattgtaattgatcaatcaggtacaagtaattatagttttgaacatgaggagttcttattgtgcgaattaaattctctttttaaacacaatagttatttattaagttcgtttattttatttaataaatttagtataaatagccaaattgcacctagactcagagagaattttacatctgtaaaagtaacgaaagaaatccaaaatctacagtttcaatcgattgatgaaagtacttcaaattatttgatacgagggggaaagtacgaggatttctttgttcaaggagaagaaatttatacatattcatttttcggaaaaagatggggttaatcccgtcataaaaagtccgtttttataacgggactatttatgacgattcctatctatactttttacgatgaaaagaaaaagagaatgttaatctaaatgtttagcactcactggacagtctcttgtcggtgtatgtctagtaagagaaaagatagccaaacctaaagataataaaactaaagatccaccaacccaggccatattggcgacattatgtacttgttttaaagctatacctccaactgcagagccgagtgaaattcctatttgtagggctgaattattaaaactttgctgtatatctgacgtatccggggcagtttggattaaataactttgttgaggtggtgcaagcccccaactcaatgcagcccaaactatcataacaggaataaataggataatagaaactgcagtaaacggtaatataaataagattagagcaaatagagtaataactatcaaaatacttttttgagcgcctattttatctgataatacaccgccaaacgcaccgccacttactgcagctataccaaacactaaataaaatatgctaatccaataagggcttaggtgaaacttattttctaaaaaaggagtaaaataagcatatagagtatagtgtcctgctaacataaacatggtagctagatgggcagatcctagtttaagactacaaacggcctttaattggatagataaaggagttcggttttcctctccaggtattttatctaaaaatactgaaattaagataatagaccccaatgataaaatagctatacataaaaaaataattctccagccaaatgtgtttgaaattaatatgcctagtggtactcctagtacaagtgaagagctaatacccatataaattaatcctaatgcttttgctcgataagcgggattaacaattttagctgcaattgttagggaaagtactacaactaaagcagtactcatagcagttaaaattcttgctatcatcataaaagtaaagttcggactaaaataagtaagtagattaccaattagaaaaatgtaaagtgaaataatatataatttttttctttccactttacttgtgaaaatcaataatacaggacctgctattgcataagtaaaggcgaaaattgtaattaattgaccagcagaacttaatgaaacattaaaatctttagcgatgtctggcaatattcctccaacgataagctatacaagacctaccgctatcgttgctaaagctaatataaatactttgaaattcattttttatattcccttctctgcattatttaccgtagaacaaaaaaactcctgactacaaacgctaaaagacgcattttgtagtcaggagttgttggttcctggtagagacccccaagccatattcttggagttatacatgattctcatatgtaattaatcaacgtaatagaagataccatattattttttagatttcaataaaaaatttgcatttgtacatgtgatcttattaatcattttattttttatcgttgtaggaggcactaatatcttcagttgatgtgcacggggttaactccatcttttttcatttctttgtagtaatttttaaacacagtgtattgatattgggttaacccgagaatttacactttatgtaatacaaagaaaagtggaggaaaagtgatgggaagtttacgattacatatagaaaataaaaaaagaaaccaagaactaagaaatatttgtttatattcaattgcaaaaacagtatcactattcggtagctcaatttatagttttgcattaggattgtatgttttacaaataaccggatctgcgttacattttgcgattacgctcatattaggaacgattccaatgattgttatgaatccatttgctggtgtcattgctgataaggttgataaaaagaaactcgtcgtttgtatggatgtactaagcgggtgcttattaataactgtttatatattaagcaactattatggattaaacttattcattatttatactactacctttcttatgacagtatttacaacgttttttggaataggattaggggccgtaaaaccgaatatggttactaaagaacggttaatgagtattaattctataagtaaaattatcgattctatatctttaattttagggcctatgttaggggggattgtttttgcagtctttgatattaaaatttttataattataaatggtatttcatttatcctttcggctatttccatattgtttattaactttaaattgtttgagcaaaacataaatgaggaatgttcaattagagaaattaattttattgaagatataaaggagggatactcttacttattggagcggaaaagcttaaaaaatacttttagtattttaatttctcttaatttctttttaggctttgctgtaaccgttccgttgccatacattattaacacagttctcaatcttaattctaagcaatttggtatgattcaagggacttttccgataggtatgatagttggtgcaatattagtaaaaaagataactgattgtttttcttattcttatctattgaaaaaaataagttttatgttggcaatttttatgatagtttcaggaatacctgttttatttaaacctattgtagtaaataatttggtatatgttactacgtattgcatgattatgttctttttaggatttatgatagcacaaattgatattcctttaatgtatttcatgcaaaatgagattcctgaagaatatagaggaagagttcttagtattggattaagcttaggtaaaataatgcagccaatagcacttgcaatatcaggactgttattaaatttcattccagcctacacgcttcccattgcaggagggattgtattttttactttgaataaaattttagcaaataagttaaatttagaaattcattcaaaagattatagtgtttaacgtaacttaaaaagcgcaggatcagcatcctgcgcttttctatcgtaattcagctgtttttctaataacaatcttatcaatatcatcttcttcatcaccaataaataacccgcgctcttttaaatacgcttcaaaatataaatctgcttctgcacgttcatcatacggttttacagataaaacgaaacctaatttgttttgttcttctaaatgagaagtggagatgtaagccggtacattgtggcgtaaaaagagttctttaaccggaataatcatatctttcattaatttcgttaacatacccatttcaaactcgaaattaaagcgatctatactacataaatcagcgaatactacaccaataaaacctgtattaaatacttcttgatattctacttcttcatcattaccgtaaaaattcttttcgattaaataatttacaaaataagcaataccatcactttgttcaaatggtttcgttgaaagaacaaagccgattttcttttgtttatgtaaatacacacatgacatgtatgctgaaatgttatgttctttaaatagagaacttgttgccccagagaggccatcaagtacgtgatgaacaatttgaagttttttacgagcgaaataataggatttcttttgtaactccaatgtatcaataaagacagagccgataaagcctgtatttgaaatgataggtgtttgcttttttcttcctctgcgctttgcttgagccattgtaaaaatcatcccttcatgtacaattaaaataaaaagaacgtttgttcgtatatttatattttactattaaaacgctataaagtaaagggtttttgacgaaaaaaacaacaaaaaagacacctgtaaagggtgccttaaacgctgtagggaagagggttcatccctacaatttatattatgatacagaaacaatctcttctgtatcttctccatctaaatgacagtccatagtacgaacatcttgatcttcatgacttccgaaataaatagtaattttcatatgtatcgctcctcgtatagtatgtttaaacttaatttttttactttcatgagagacctgtaaaattagtttgtctagcatctaaaataaaaattgacgtttcacgttgtttgtttcgttcagttttcaaagaacttgtccgccgcttcagaagcgacttcaccatattaacatcttcatttttcgatgtcaactaagttttaaaatttcttttttgtcgttttctgcgtttccgcatcagcgacgtttattaatataccatcacactttttaaataacaagtgtttttttataaaaatataaaaaaattatctaccctactttcttctatagaaataactattatcctctctactaaaaatagttattctgattgtatactactacacttcattcaaccaaattgaatttcacaataccttcccaaattttcattctcttctatattaaggtttataataattatccttctataaaataactatacaaattagccgtaagaaaaaatcccatctacattaaacagccactcgcgcgcattatccccttccttctcattcgaaaattcccccctacaaattaacaacattccaatcctaatataaacttaaggatattgttagaatttttttacatttaattaatgaaaaatatccattttttgttatatagtaagaaaggacgcactcaactataaataaaccaatggaggaattattttatggataggttaacaaagttttcattaaaaaaccgagctgccattatcatcatgatctttctcatttccatactcggtgtttattccggctctaaattacctatggaatttttaccaagtatcgacaatccggcaattaccgtcacaaccttatctcaaggactcgacgctgaaacgatgacaaaggatgtaactgatcctctcgaaaaacaatttcgcaatttagaacacgtcgacaccattacttcttctacatacgagggattatcacgtatcgacattgcgtatacatcaaaagcaaacatgaaagatgcagcacgcgaagtcgaaaaagccgtcaatacaattaaattacctaaagatgtaaccaagcccgtagttagtcaattaaacacttctatgattccactcgctcaaattactatccagaaacaaaacggtttttcaaaagcagatgaaaaacaaattgaaaaagaaatcgtaccacaactcgaaaacattgatggtgttgccaacgttatgtttttcggaaaatccacctctgaattatctatcgtacttgatccgaaccaattaaaaaacaaaaacgtaacatcacagcaggtactaactgttttacaaggaaaagaaacttctactccagctggggcaattactgttaatcaggaagaatacaacctccgcgtcattggggacataaaaaatgtaaatgacattaaaaacatcactgtggcaccccaagtgaaattgcaagacattgctcaaattgaaattaaacaacactacgatacaatctcacatataaacggagaagaaggcacaggattaatcatcatgaaagaaccgagtaaaaatgcagttgccattggaaaagagattgataaaaaagttaaagagatagataaggaatataaagatcaattttctattaaacttttggcttcaacccatgaacaagttgaaaatgctgttactagcatgggaaaagaagtaatacttggagcaattgctgcaactctaattatcttaatctttttacgtaacttccgaacaacactcatcgctgttgtcagtattccattatctattttattaacactctttttactacatcaatctaacattacgcttaacattttaaccctcggtggtttagctgttgcggttggacgtctcgtcgatgatagtatcgttgtcatcgagaatattttccgccgtttacaaaaagattctttctctaaagatatcattctcgatgcaacgaaagaagtcgcagtcgcaattacttcttctactttaacaacggtcgctgtttttttacctatcggcctcgtagcgggagcaatcggaaaattaatgttacctatggtattagcagttgtatattctatactatcatccttaatcgttgcactaacagttgttccacttatggcttttttactactcaaaaaaacaaagcatcgaaagccaaattcttcatcacgatatgtcgctacattaaagtgggctctttctcataaattcattattctacttactgcatttttattatttgtaggatcaattgcagcttatatattactaccgaaagcaaacataaaatctgaagacgacacaatgttatctattaacatgacatttccagccgattataatgctgaatctcaaaaacaaaaagcatttgattttgaaaagaaattactttctaattcagatataacagacgttattttacgaatgggatctagcgcagaagatgcacaatgggggcaaacaactaaaaataacctcgctagtatattcgtagtctttaaaaaaggttctgatattgatcaatatattaaagagttaaaaaaggaaaataaaacttttgagcctgctgaacttgattatataaaaacaagttattcaagctctggcggcggcaataacttacaatttaacgtaacagctactaacgaagcggatttaaaagaggcggctactatcgttgaaacaaaactaaaaagcatggatgatctttctaaagtaaaaacaaatttagaagactctaaaaaagaatggcaaattcatattgatcaaacaaaggctgaacaactaggtttaacaccagaaatagctgcgcaacaagtagcattccttatgaagaaatcacctattggcgaaattacaattaataatgaaaaagctactattatgatagaacacaaaaaagaaaacattaataaacaagaagatattttaaatacaaacatactatcacctattaatggaccaatacctttaaaagacatcgcaactatttcagaaaaacaaacgcaaacagaaattttccataaagacggaaaagaaacaatccaaattacagccgaagcttcaaatgaagatttgagtaaagtaaacacagcagtaaataaagcgatgactgacttagatttacctagtggtgcaaaagtaaatatcgcaggagctactgaatctatgcaagagaattttacagatttattcaaaattatggggattgcaatcgggattgtatatttaattatggttatcaccttcgggcaagcacgtgctccttttgcaatcctattctccttaccgttagctgctgtcggtggtattttaggattaatcatttcacgaacacctgttgatgtaaattccttgatcggcgcattaatgttaatcgggattgttgttacaaacgctattgtattaatagaaagagtccaacaaaatcgggaacacggaatggaaactagagaagccttacttgaagcaggttctactagactacgcccaattattatgacagctattacaacaatcgttgctatgctcccactcctatttggccaatcccaagcaggaagtatggtatcaaaaagtttagccgtcgtcgtcatcggcggtttggcagtctcaactgctcttacattagtagtcgttccagttatgtatgaactattagataaaatcgggagaaaaagacgctcccgtaggaaaataagcacttctacagaaacacctgatatttaaaaacaaaaggcgttaccttcacaaatgaagataacgccttctctctatttattcataaaatccatcattttttccacatattgctctataggtttactagaatccacaatccaaattacatctgttcttctttataattaatcacaaattcaacaatcattacatccattccttctatattaaaatacaaaagaaccccctacctataaatagagagttcttctttataatttatgccgcttttacctttttcgttgttttactttttcttttcgttcctgtaaagcgcttgtgtaatatagatgctatcaagcgtgaaataacattgaatagtaataccataataattaatacagctgcagattttgtcgcaatcaacttcgcatctggaataactccttcagaatttaatttccaaatgtgaaccgctaatgtttcagctggtctaaacggatttaaaggatgcgcaggacttgataaatccgctgctgaatttaaaatcggggatgttaaacccgctgtgtaaattaatgctgccgcttccccaaatatacgacccgccgctaaaataatccctgtaataatttgtggtaatgacgatgggataataatacgagcgattgtttgccacttcgttgcacctaatccaagacttgcctcttttacattatgaggaacttctgaaatcgcattttcacaaacacgcgttaaacctggtaaatttaaaatagttaaagcaagagcaccacccattactgtgtatccccaacctgtcattgtaacgaacactaacaaaccaaataaaccaacaacaatagaaggtaaagacgccatcgtctctatacatagacgaacaaaatttaaaaaacgtccttgttttgcgtactctgctaaatatattccagcacctaatccaagaggaatagatataataagcgttataacaagcatgtagaaggaattgaataactgcggaccaatcccaccaccagctcttgtattgcttggttctccaaacaagaaattaggatcccaaaatccccatcccttttgtaaaatttcaaatactaagaacactagcaaagctacaactaaagctgcaaccgcataaaagatacctgtccaaactttatttaccgttcttgcattcattattatcgctcacctctttgcccaatcgctcgaattactaaaataaacaggaatgaaataacaagtaaaatcatcgctaaagtccatagcgcattgttccaagcagttccgttcaatgtattcgtcatgtccattgttaaaataccagttaacgtcgctgtcggactatatattccttctggtaatttaatcgtattcccgattaccatttgaaccgctagcgcttcaccaaaagcacgcgctaaacctaaaacaacacctgttaaaatccctttcttcgcagcaggaacaattactcggctaatcgcttgccatttcgttgatcctagaccataagaagcttctaaataatcaaatggaacagaacgtattgcatcagaagcgatactagcaatagtaggtaaaatcataatacttaatacaacaatacctgcaattaagctaaagcctactcccccaaacgaatcacgtaatagtggtactaaaatcgtaacacctaataatccgtatacaaccgaaggaataccaactaacaattctagaacaggcttcaatactttatttccaaactttggcgaaattaaattcatgaatatagcaagagctatagcaattggtgcactaataataaccgcacctaacgaaaccaccgttgaacctacaatgaaaattaaagccccgaaggatccttgatcagcatttggattccattttgtcgatgttaacatctcagtaaatgagataccactttgtgtaaaagattgaatacctttcccacaaataaacgcaataatagctaatgtaattaaaacaataaaaataccacaaaacgtaacaagtgatcttcctatatattcactttttacgtaattaatttgttttttccccttcatcacaggacagaccccacttcacagattgaaatgaacaggactggccttgcagccagccccataaaattttattacttatttaatttagacattggaatgtagcccatatcttctacttgcttttcaaaatctttaccttttacataatcgatgtaagctttcgtcgcttccttcgcttcaccttttgttaccatatattcgtaagaccagaatggatatttaccagacgcaatgttttcaactttcggttcagcaccatcaattttcactgtttgtagtgcgccttttttctcgccgaccatgtaagacattgctaaataactcaccgaaccaggagtagagttaatcgcttgctctactgcaccgttagaatcttgtgttgtaccagttccatcattaattttcgcgtctttcataatcgttttttcaaatgtagcacgtgtaccagatgaagccggacgattaattacattgattttttcatcttttccgcctacttctttccagtttgttacttttccagtgaagatatcttgtacttgttgcattgttaagttatcaacttttacatctttatttacgacaagagcgaatgcaatacccgctaccttgttatctactaattctttcgccttttcagcatcttttattttatctccggacggaacatccgaattaccaatttgcactgcaccagatgctacttggttaatcccagttccactaccgccaccttgaacttgaatagaaacttttgaatttttctccatgaatttctttccagcttcctccgcaagaggtagaagagctgtagaaccagccgctgcaatcgtacctgataattcttgttttgtattatcgcttcctttagcagtttctttactagttgtatcttctgctttcccacaaccaactaatgctcctgctaccactaaagctgctaaagaaaatttaataccttttttcataaccatgtcttgtacccccatttggattatcacttttcgaattcattttctttcgaacacaaattcattgtaggacaacaatattatgtgagtgttaagcaatttttaattttaagtaaatgacgataataatccttaaaagctagaaatcccaacatttatagttaaataacccaacaaaaaccacactaactacgctgcaatgtaaatatattcttaacaatgtaaattcaatgtaaatgtttttctatctttttcccttttcgttaaagttacatttacaattccgctgtattttgtaatttttacacacctaatttatgcacattaaaaataatttcagtaatattttttagtacaactaaataaattggaacaattctaaaaataaatgaatatttttaaagtactaattgacaacataatccaatgtagtctactatattactaacaaaaagtttaccttaggaaactttttaaactcaaactaaaaatatagagatgaggtaacttttatggtatcggctaatataaaaccactttccgaatttaaaataggagagtttgtacaaattgagaagatacaattagaaggaactatgaaacgacgcttattagatttgggatttatcccgggggcgacgattaaagtattgcaacgcagtccacttggagatccggtcgcttatcaagtgagcaacacaactattgcactgcgtaaagaagaaagctcccttattttcggggtattaataggagatgatttcagatgagcaaacatcgtatcgctttagctggtaacccgaatacagggaaaagtacattatttaatactttaacaggcttaaaacaacatactggaaactggacgggaaaaactgttttaaaagctgaaggagaatatgaacataacggaagtaattatacattaatagatttaccgggaacttactcactatactcaaattccgcagacgaagaagtagcgagggattatattatatttgaaaaaccagaagtaactgtagttgttatagacgcaactgctatggaaagaaatttaaatttagcactccaggtgatggagatgacaaataatgtagtcatttgcattaacttaattgatgaagccgagaaaaaagggattgttatcgatgaaaagaaattagcaaaatcacttggtgtacctgtcgttaaaatttcagcacgtcaccgagtaggtattggtcatttgctaaatgttattgcaagagtagcaaataaaaaactaattccaacaccaattaaaattacttacagcgaaaaaattgaaaatatgattcaggaattagaaccacaaatttataaagtgttcggtgatacgtatccagcacgttggattgcgttacgtatattagatggagataaaaatttcttaactacacttcaaaaacaccataatgaaccacttgtaagggaggtcgtaattaatggaatctcactcagccagtaaaggtcttccattagactatattattcaacatgcacaaacactttcaaaagaagatatacgagatgatatagtcggagatatttaccgaacatctgcaagcatatgtaaagaatctgtccaatatacaaatactgataaattatatcgttccgaaaaactagataaaattttcacatctccaatctggggattcccaattatgctcggtattttatctattattttttatcttacaattgcaggcgctaacgtaccatctgatatgattgccgaattcttcggatgggccgaaggatatttaacatcttggttccaagcagcgcatgcacctgaatggttacatggcattttaatacttggtttgttccgtggtatcggtgctgttattagcgttatgttaccacctatggcaatctttttccctatgttcgcgctattagaaaactacggatacttaccacgtgtcgcgtttaatatggaccgcttattcaaacgatccggcgcacacgggaaacaatctttaacaatggcaatgggatttggttgtaatgcagcagccattatgtcaacacgtatcattgaatcaccacgtgaacgtatgctagcaattttaacgaacaacttcgttccttgtaacggtcgctggcctatgttaattttaatggcttcactatttatggctgctggttatacaggcagtatgcaaacattggttactgctggcgttgtagttggaatggttgtaattggtgttattatgacattaactgtttcttgggtactatcaaagacagccttaaaagggattccaactcactacacacttgagttacctccgtaccgcaagccaaaagtttggaataccattgttcgcgcaacactcgataaatcaatctatgttttaaaacgagctatagttgttgctgcccctgcggctgcattaacttggttacttgctaacatttttatcggtgacacaagcttacttatgtattttgtaaacttcctagatccatttgctaaaatgttaggacttgacgggtttattctagctgcattcattcttggactacccgctaatgaaattgtaatcccaattttattaatgtcttacttatcaactggggctttaactgaaatagatgattttaatcaaattaaaaatctattcctagaaaatggttggacttggttaacagcgttaaacacaatgttgttctcacttcttcatttcccgtgcggaacaacacttgttaatatatacaaagaaacaaaaagtgcaaaatggacattcttatcgtttgcaatccctaccgttatcgccattgttgttacattcctctctacacaattggtacattggttagggcttgtataaagcaaagcatacatagaaggtatcccccttcacatatgctttgcacgaaagaaacctgaaattattcaggtttctttttttgcacatcagtattccacggctgtgctccatacgttgtgagttttttatgaataaaatatatagttcctggaagaactgccattaatatcgtgcaactaattcctaatccagtaaacaactttcatcaccttatttcactcttttcggtaaagctgaacctgaatgttcaattgttggatgaacatgaacagtaatttcagcattactaaagtaattttcgccttgatcccaattcttacttatttttgtccactctttataattatgtcgcttatacacttcccctaactctaatacatctaccttatattttttttgaacaagcttaatcgatttttgaatacgctcctccatttcttccgatatatccttctctaaacgcttttcattcaaaacctttttatgatcactgaaatgcaactcagccaatgtgccttccagagataaatgaatatcaaactttggttttgtagcattcgttgtagatactttaatttttcgacgcaacttatgaatttcatatgtaataagttgattttttttacgaatcgtaaaaaaacctccaatttttttgcctattatataattcatccctaatgtttcttccccactcaaattgcctacacatttattatcctttccacgaaacaatgctgcaccgttcatttgtaccccttgttttgtcagttcaagaataggtaatacaaaactgcggttagagatcatcttctcctgtacctccccaattcttgcagcctcaatcatttgggcatttttcggagggtgttcagctaacatatcaatatactgcgccggtaaattttcaggcttggcactttgttttaaaatagcttctgcatttttcttagaaacgaacaaacgaatatttcttctcatttcatgatcgcgaatatatacatctaacgtattttgtaaaatgtatggatgtgaaagtaattcttcagagaaaataatcacttgtatatgagggaaaaataatgtacggctaatttttttagcgattattcttatttgttcaaatacactatctgcttttgcactaacattaatataattttcgctatccccacccccttgtccaccctgttgagacaatttactggggagtaccatctgataggtccctttcataattggattcgctttcttctccttcacgatatcgtaagccgctcctactacaaatcctctttcttctatctcttctaactcagaacacccactcataaatccagttaaagccataaccattataattttaagaaggtgtttcatttccaccattccttctttttattttatatacaattaaaacgagcaaaggtgctaacacaacacaccccatatctatccaagctaaataagtcccataacttgataaagcattcaaactactaggtatcatattcgccataaaaataattggggcacttacgaaaataaaaatatgtttcttcactttcggaaacatagcacaaaacaataaagatgcgacatcatagtacattgctgtcgtgttataaatagtaataatccaagtcgtaaaaaaaatcgcatcaaacctttctaaaaatcctccaccaatttcaatttctttccctaattcaattgttggatatgtcaatccacgtgttgtcatatacgtaaaaacactaatacaagttacataaattaaaatgtatgacagcacgtttaccatcaccgctttcgcgactgccatcggcgcttttttcgctgtcttatcattcagcaacaccgcataaaataaagctacttcaaatccaataaacgtaaaaatagaatttttaactccaacagcatattgacttactttcgtttgaaaagctggtagtaaattatttatttccattaaatttatattcaataaagaaagaagtactatcgcaattaaaacaataggtaagaataaaacatttaaccttaataaggctgctcttgatcctgctattccataaataacaactaataagaagaagaaagacagtagttgtattggtgtatcactaaataaatacgtttgagaaataactgaaatcattcgcgattcatatgctgtcaaagcagcaaacgttaatactaaaatacaactaattgtgtatgcaacaggcttcgtcaaatgcgcactcgtatattgaacaaaattttgttttggaaataagatagccactctcgtcacaaaccagcctaaaactgcgcaaatcaatccacccaaaagcaagataatccaaccgtccgaaaataaagtttggttagcgatatctctcggcatagacaatgcccctataccaataatggtcgatgataccgcaaacccaatttcccgagatccaatctcttcatcgccatactcaaatggtttcacttattttcgctcctttggacgtattgtagaatcttttgtttgtaagtactctggtctatctttcaacatcgattttggcatgcgaataaattcttctttccaatctttataaaatgcaggagcaataggagttgtatacggtataccaacacttgttaaatttgtaatatgaatagcaagtgcaatcagagctagaatgatcccatacagtccaaaagccgttgcagctaatacaaagacgaaaagtaaaattcggaacgtaatcgtaatactatatacaggaagcgagaacgtagcaatcgcagtaactgcaataataataactaaaaacggatttacaatccctgcatttaccgcagcttctccaattacaagacctcctacaatccctatcgtttgtcccattggtttgggcaatcggattccagcttctcgtattaattccatagtcaaggccatcattaacgtttcaatatatgctggaaacggaacaccttccctcgcacctgcaattgaataagccagtttagaaggaataagtccttgatgataagatacaagtgctacatacatagctggtaacaaaaccgcgattatacctgaacccatacgtaaaaatcttagtaacgttccaatcacccagcgctcgtaatgatcttctacagattgaaaaatatcaacaaacacaagcggtgcaataagagcaaacggagatccgtctactaaaatggccgcttttcccttcgctaatgacgctataatattatctggcctctctgtattcaaaaactgtggaaatggagataaattattatcctgaattaattgttcaatcgtacctgtttccaaaataacatctgtcactattgattgaagacggcgatctaactcttttacaatgtgaggattaataatatcttctatatatactagggttacttctttctgcgatcgcttccccataatataagattggaacctcaactttggatcgcgtaaactgcgtcggattaacattttattcacattaatatcttcatttaatccaactcttggtccgcgtattaaatcttctgtcactggtggctctaaacttctcttctcccaagccctactattaataacgatagcagtttgaatattatcaattaatataactgtatctcccgctaaaatcgcatttataatatccggaaacgttgtcttcttacccacttccgcaatagaaataaaatgatccaataacgtctgaacgacagccgcttcattttgcacttcttcatattgaagagtacgaactacatatttataaacattatccttgtctgttaacccacataaaaacacaaccgcacaacgtgtaaaactcccagcaagaacaacttctctaattgttaaatcattaggtgaacctaactcatccctaatttctttcataacttcaaataagttaccttcaagctctaacaatttccccacctaacttccttttcaacaagtttttagttagattccgctaattgaagaaaatatatacaaaaaagagctatctcttttcaaagatagctctaataaagtaaaactttaatcagccctcaccaatcggacttttacaggcagcagggcccctacctaacttctttgcttccgctgaattttgagttgagggtcttactgcccgttaatgcgggataaacgaattacttttctactattatattgtttttctttatagatacactttttgtaaacccactaactacaaacatcacaatcatattaattaacaatgcgactatgcctacattcaaatcttttatatactgcgggaaactcggaaacattgtggctatagttgaaccagataaggtaatatatgcgaccactaacagcccaactcctattcctgcaatcgctccttgcttcgtaataatttggcgtggaaacaagctacatacaagtgcagggaaaagttgtgtaacaatactgtatcccattaatagaagcgctcctatcgtttctcctcctttaaatgtaaataaaactgccacgagcgttactacaggcacaaataattttgccatcttagcaacttgtctatctgaagcagatggaactatcgttcgataaatatttttcgctaacagtgtagaagccgccataacaagcatcgaacccggaaccaatgccgttaatactcccgcactaccaataattccaataaaccaaggatcaaaagtttgtaaagcaagacggaataacgaaagatctacatccgctccctttaacccaggaacttgcaatatagcagcaaatcctgcaaaaaatacgaaaagtaaaactaaagaatacaatggcataattgctgcatttttacgaaatactttttcattttttgcagaaaaagcagaagcaaatgtatgaggccacatataaaaaccgagggccgttaatataatagtagaaacaaaccaagaaatactcattccttcttcaggtaaagataaaaatcccggtttcgctgcctctacagcctcaaacatcggctgaaatcctccataataatgatacggtaaatatatacctaaaaacataacgataaacagtatcataatatccttcaaagcagccgtccaagccgaaccatgtatacctgaaaccattacatatatagttataacaatagcaccaatccaaaccgcaacaacaggtgacacccttccgtaagaagcttctgaaacgataattcccagtccttttaactgtaaaacaagatatgggatgatggaaacaacaccaacaattgaaacaataatcccaagcgctttacttctatatttcttcgcaaaaaaatccgactgtgaaacaaggttatgctctttcgcatacttccaaatcggtggcaataaaaaatacgataaaagataagctaaagcgccataacctaaaatataaaaggtaggtgctcctttgctatacgcccagccacttcctcccaaaaatgtaaacgtcgtataaatttcacctgccataaggagaaaaacaaaaatagtgccaaaccctcttcccccaactgaccattgctctaaattcatatcttttccatgttgtgcccgaatccctaaaaatagtgcgagaaacaaaaataaaataatgataagtaatgcagtcattttacatcctccttattagcaggatcaaacacgtacacaagccccatacaaaaagatgtaataaacactgataataatacccaaaataataaaaatggcatccctaatacgtaaggagtaactgaattcgcaaatattggcccaactactaaacaaagaactgggataagcgctagaatgtgtattttcttcatctcattctcctttacttataaagttcataatggctgatacaaagacttccactccaatcagtaatgcatcttcgtcaatcgtaaaacgagggtgatggtgaggatatataatacctttctctttatttcccgctccgataaaaaagaatgtccccggtgccttttgtaaaaacgctgaaaaatcttctccagccatcgtcggctgtaaacgaacaactctatcccttccataaagttgtaatgccgtttgttcaataagctctgtagcttcatagtcatttacaactggtcgatacccatattcatatgaaaatgtatatttcgctccgtaagattccgtaatatgcttcacaatccgctcaatcttcttctctgtttcacctcgtaattcatgtcttaaacttctcactgtcccttcaatctcggcttgctctggtattacattatgagttgtccccgcatgaaattgcgtaacagatattacgagagaatctaatggattcgtgaggcgagatacaatttgctgaagttgcgaaacgacttgtgttccgattgcaatactatccaccgtttcatgagggattccagcatgtccaccttttccctctatcttaattttaaaaacatccggtgcagccattgcaggaccataaataacacctattttcccaacctctaacgacgcccaaaggtgagcaccaataatataatccacaccttccattacacctgcagcaaccatctcctctgcaccaccaggaaaattctcttcagcatgttggaatagaaaacgaatctctcctttaatcttctctctttcttctactaacttatgtacaaccccaagtaatatcgctatatgtccatcatgaccacatgcatgcattacacctttatatatagaaataaaatcaaactcattttcttcatgaataggaagagcatccatatcggctcgaatcgcaactgttttgcccggatgtttacctactaactttgccatcacactatatttagtcggccgtgacacttctaaatatgggaatttccgaagtatatcgaacacaaactgcgatgttttctcttcttgaaaagataactctggatacttatgaaaatgccttctccactcaactaactgattttttgacaaaacaagttcctttgcaacatccatttctcttctccccttcttcaccaagttaaatgttattataacgtgaattgttaacttttaaaagaatcttctgaattttcagtgatggtaaactaaaaagaaaaagccatccaaaagatgactttttcattattataaaatagtaattgcttgttttcccatttgctcccaagctttctcaaattctgctcgcggaacagccaagcgcggattatttttaagaggatcatttacatatacaaagttttgatcatatccaattactactgcactatgctcataatatgtaattttcacttcgcctgaactcgtattccatgtttcaaaactactttcagctagcggcttaaacgtcgtattaataatgacccataccggagaaccagaactaattactttatatatatcttgcatgtctctacctgttaaattaattactttttcaggaacatatttttctgctaaatcaaagattggtttattgtatacaccatatccaggctctgcctttgtataaatatttcccacaaatccctcgtaaggatttccacgcaaaccattttgttcaaatggaacacgatgaatttcgctagcaagttgcatcttatctacttgtacacctttatattgcagcaacatagctaaacttgtcacttcacatcctcgaggtaattctggtaattgtttaataaacggaacatcttcaatcatagctgcttctttcatttcagatagaaactctaagcgtagaacttgcgccttttgcatgattttatcttttcctataaaaaatgcagcagcaagtataattccaaaaacaaaaagatattttaactttttcattataaacaaaactccattaattattattttacagatacacctcttatcattgtacccttcttcttactagtttgctagaaagatcatgtgaattatcgctcatagaattaattataaaaattctaattatttttaataaaaagaaaaataaatatacatttacagaatattttgctaaaatcaaaattgttaacatagtgaagatatcaccatgttaacaaacattcttagagtatttagtcatagttcgttttttacatactccattcatttcatagcaaataaaccgagtgtgttttgcatcccccactaatgattaaaaactcagaataaaacgaagtttacacattcaagaaaatacggggtgaggggcatatgaatcaacaaattgaacaaacagatttaaaacgaacaatgaaaagtagacacctatttatgattgcactcggcggtgttatcggaaccgggctatttatgggatctggtcaaatcgtccataatgccggacctggtggtgctattcttgcatttttagtcggtggatttgttatgtatttaacgatgttatgtcttggtgaattatccgttgctatgccagaagcaggttcattccaaagttatgcaagcaaattcatttcacctggttttggatttgttgtcggttggatgtattggttaaattgggctgttacagttggcgtagagttaacaactgtaagtattttaatgaaacgctggtttccagacgtttcttcctggatttggtgcgttacatttgcagcagcactcttcctcgtaaacgctttatcagcaaaagcatatgcagaagcagagttttggttcgcaagtgtaaaagtcgcgacaattgtcattttcatcgtgcttggtggcgctgttatgttcggtctactagactttaatggaaagccagctccaatgcttcataatttcactgaaaatggcgggctatttcccaacggtgcattagctgttcttcttacgatgattacagtaaattactccttccaaggaacagaattaattggaatcgcttcaggagaaagtgaaaatcctgaaaaaacaattccaaaagcaataaaaaatacaatttggcgaactctcttcttcttcgtcttagcgatatcagttgttgtaggtttactcccatggcaagaggctaatctagttgaaagtccctttgtacttgtatttgatgtagccggtgtcccatatgcagcagatattatgaactttgttattattacagctgtattatccgttgctaactctggtctatatgcaaattctcgtatgctgtgggcgatggcaaaacaaggaatggcaagcccagcatttacgaaattaactaaaaaaggtgtaccgctaaatgcattaattttcagcctaattttcgctagcctgtccttactaacaagtgtatttgcggcagatactgtctttctagttttaacatctattgcagcaatggctgccgttgtcgtttggatgtcaatcgccgcttcacagtttttcttccgtagaaatttcgtgaaaaatggtggcaacataaatgatttaaaatatcgtacaccgctctatccactcgttccaatcgtagcgttctcgctcaatttcattacatttgttagtttggctttcattccagatcaaagaattgctctttattgcggcattccatttatgattatttgttacattttataccaagttaaatataaaaaaattgtcacacttgaacagccacgaactgtcacacaagaaataaactaaatatacaaaatattcagctatcttccttatcataagatagcttttttctatttcttggatatcctggtataactttatttatcttaaaattttcacaatcacgtttttctctggaaaatagtttacaatgtaatcaagttacaaatgatattcaccttaaaaagtgtgcatttgtgtctattttttaacaatatatcaaaaactattgccttctataaattaataggtttatattgttttattggcatagtttcaatccaaggagaaaggagattttcaatcgtgcaactaaagaaagcgttttggaagttggcttcacttcttccgttatcattacttctgttcctcggtggctgtgataaaaaactcgcagtattaaatccgcaaggacctgttgcaaaagcacagtatgatttaattgtttggtcattcttgcttatgtcattaattatcgcaattgtattcattctgtttacagtcatcttgattcgttatcgtgaaaaaccagagaatatggactatgagccacctgaacaacacggtaacacattactagaaattatttggacgcttgttcctgttattatcgttatcgcattatcgattccaacagtaaaagcaacttatgcttcggaagaggttccgaaagagtccaaacatattaaaccagttgaaatttatgttacatctgcaaactggaaatggttattcagttacccagaggaaaaaattgaaaccgttaactatttaaacatcccagctggtgtaccaattcaattcaaactgacttctgtcggcccaatgaatgctttctgggtaccagaacttggtggtatgaagtacacaatggatggcatgattatggatctttatttacaagctgataagccaggttcttacctaggccgtagtgcgaacttctctggtgaaggattcacacacatggagttcgaagttgaagcaaaaactaaagagaaatatgacaagtgggttaaagaagtacaagaaactgctcctaaactaacagaagctaagtacaacgaaattgttaaaccaggtgtagttggtcgtatgacattctctagtcaccacttaagttatgtagatccaaaatcacttgaatattgtgattataactactacaaaaacaaaaaataatagctattattccaacagattggagtgaacacagtgaagcttgatgaattctttgtcacaggtgacccgattatttacggtgcagacgcttctatcgttcttgtgacattagcaatcattttcgtactaacaaagtataaaaaatggaaatggctttgggacgaatggttgacaactgttgaccataaaaaaatcggagccatgtatattatttctgcggttatcatgttattccgtggtggtatggatggtttaatgatccgtgcacagttaacattcccagaaacaacttatttaaacgctgaacactataacggaatctttacaacgcatggtacagtaatgattcttttcatggcaatgccattcgttatgggattaatgaaccttgtagtaccattacaaattggtgctcgtgatgttgcatatccgttcttaaatgctttaagtttctggttattctttgtcggagcaatgttattcaacatcgctttcgtaatcggtggttctccagacgctgggtggacttcttacttcccaatggcaggtacagagtttacttcaggcgtaggaaataactactacgcaattgcattacagatttcaggtctcggtacgctaatgaccggtattaacttccttgttactatcttaaaaatgcgtacacctggtatgactttaatgagaatgccaatgtttacttggtcaatcttaattacaacaattatcattattttcgctttcccagtattaacagttgctcttgcattaatgacatttgaccgtctattcgatgctcacttctttacgatggcgagcggcggtatgccgatgttatgggccaacctgttctgggtatggggtcaccctgaagtatatatcgttattttaccggcattcggtattttctctgaaatcattagtacattctcacgtaagcgtctattcggttacagtgcgatggtatactcaatggttgcaatttctttactaagtttcgtcgtatggcttcaccacttcttcacgatgggtgcaggtccagcggttaactcattcttctcgatttcgacaatggcgatttcgattccaaccggtgttaagatctttaactggttgtttacactgtataaaggacgtatccgttttacagttccaatgctttggtcattggcatttattccaaacttcgtagtcggtggggttacaggggttatgcttggaatggcagctgctgattatcaataccataacagctacttcctaatcgctcacttccactacgtattaatcgcaggtacagtattcgctatgcttgctggattcacattctggtatccaaaaatgactggtcatatgttaaatgaacgcctaggtaaatggacattctggatctttatgagcggattcaacatctgtttcttcccaatgtacttcttaggtttagacggtatgactcgtcgtatgtacacttactctgaaagtcttggatggggatggctaaaccaaatcgcatctgttggtgcggtaatgatgggtatcggcttcctacttctttgctacaacgtaatttggagtgcacgtcacggtgaacgtgacacaactggagatccatgggatggtcgtacacttgaatgggcaactcactctcctgtacaacattacaacttcgcgaagcttcctgaaattaaagaagctgatgctttctggtacatgaaaaaacgcggagaaacagttacaccagcagcagaagatattaaaccaattcacatgccaagtaactctggtgtgcctattattgcgtctggattcttcggtcttgcaggtttcgcattagtatttagctggttctggcttgcagcaatcggtggagttggtattttagcttgcttaatctatcgttcattcgattatgatgaaggttactatatcagtgttgatgaaattaaaaaaacagaacatatagcatgagaggtgaaatgacatggcggctttagataaaagcttacctttggaatatcaatccgaacaaagcagattgaatatcctaggattctggatttttcttggggctgaaattatgctgttcgcaacacttttcgcctcttatctagtccttgctggtcgtacggcagatggcccaacaccagcgcaattgtttgaacttaaaacgcttttaattcaaacattactacttttaacaagtagttttacatgcggtatcgtaattcatgaaatgcgtaagcataaccaaaaagcgatgcttggatggttcgtccttacattacttttaggtgcaggtttcctattctttgagattgaagagttcattatgtacattggtgaaggcgcaacaattcaaacaagtgctttcttatctggattcttcgttcttcttggaacgcacggagctcacgtaacaggcggtatcatttgggcaacttgtgttattatccaaattttaaaacgaggtttaacaccagttacagctcgtaaagtattcattatcagcttatactggcatttccttgatctagtttgggtctttatttacacactagtttacttgaacgggatggtggcgtaaatggctcaaaacaacaatcaagcaaacgggcatgcgcatagcggattcccttggtcacacgttttcggatttattttatcgcttgcattaacgtttctagcgttatacgtggcactttacacaacattgccactttcaacagtcttaacaactattatcataatggctgttgcgcaagcattgttacaattaattatgttcatgcatttaaaagaaggagaaggaagagttcaaattcttacaatgatatacagtttcttcgttgcaactgcaacagttggtttaactgtatggatcttcttctcaatgtaatgtacatgaaaaagactgctgagattcctcagcagtctttttttatcccctcccctgttacatccacattacggaattaacaacagaatcatgaaaaatatacttattatgacaaatgttaagaaaaatctttctttatgaaatcgaatccatatgcgttgcttttctacctattatatggctaaataggtactatatttatttgaagggagagaacgcaatggaacatcatacttctgttctatcacttatggttgtcgttgcaatcgcgtttttcgttccccttttgttacaacgctttaaattaaaagcacttcctgttgtcgttgcagaaattattgcaggaatctttgtaggtaaaagtgggtttaatattattgagccagatatatggcttcaagttttatcaacattaggatttatcttcctcatgttcttaagcggtttagaaattgatttttctatctttaaacaaaaagggaaaaaaaatacgacaaacgagccaaatacatttcaagtagcaagcattatcttcttatttattttcatcttatcttatgccctatcattactattcgtatggctaggatttgtagataatgcaatgttcatgactttaattatttcaactatttctttaggtgttgttgtaccaacattaaaagaaaacaacctaggaaaaactgcaatcggacaaatcattttattagttgctgttattgcagacttagttacaatgattttactcgctgttttcgtcggattaaattccgaaagcggtcaaagtatgtggctcttacttattctattcggtgccggtattgtcatttactttattgcaaaacgctttaaaaacattccatacttagatagtttaaaagctggtagtgtacaaattgatacacgagctgtttttgcactcattttaatcttagttgggttatcggaatctgttggagcagaaaatattttaggtgccttcttagcaggtgtacttgtatcgttattatcaccaaatgaagatatggtggaaaaacttgattctatcggctatggtttcttcatccctattttcttcgtaatggttggtgtaaatctagaggtgtggtctattttcaaagaaccttctagcatgctaatgattccaatcttaattgtaggactctttatttcgaaactcttaccatcactcgtcttaagaaaatggtatccacgtaatatcgtacttggaagtgcaatcttattaacatcgacactttctttagttattgcggctgcacaaattggtgaaaaactggagatcatcagtccaagtttatctgcctctcttattttaagcgcagttattacttgtatttttgcacctatattgtttaaaaaaatgttcccaaaagtagaaacaccaaaaccaaaagtagctattattggcgcgagcagaattacccttccgttatcactagatttaaaacgagaagattatgacgtaacgctatatatgatgcgtcaaaacaaaataaatgatgaagaagcgaaatcacatgacttccctatcgtgaaattagatgacatcacaatcgcatcattaactgaacaaacagcatttgatgcagatcgcgtcgttgttgcaacaagcgatgatgaacaaaacttattattggcagaacatgcaaaagagctaggtgttgaacatgttattgcaagtgtagaagatccacttctacaagaaaaagcaacgcaagaacatatcgctgtattctcaacaattaactctacacgtattttattacgtgcacttattgataaacctagtctcgttcgcttaattacaacagcaaacgaaacagtacgtgaagttgaactgcgcagcaataaatataacggcgttgcgcttcgccgcctcccgtttttaggtgatgtacttgtcattcaaatctaccgcggtaacaaagcattaataccgcatggtgatacaagactacaacacggtgacacattacttgtaacaggttcaaaagaacatatcgatacactaaaaaacatattagagtaaaaaaatgcccctcacataattgaggggcatttttttaacttcatatggtaaaatgttactatcacatattatgaggatggatcacattatgtctattgtaactttagctcttttattattagcagaaatactcgttgccattattctcatcggtgttagtattgagatttgtagttacggatggaaaaaatcgaatggaataaaatattcttgcctcctactttcactccttctcggaactgctagcatactcggacttctcgccgcacctgcttatttctttatacaattaacagaaaaggccttataagaaaggatgttaatatgattatcgtgaaaaatattgagggatctgaaacttacgtattacgtcaaaaaattttacgccccaatcaaacattagcagattgtaaatatccttccgattatgaaacagacaccttccacttaggcgcatttataaacgatgaactaattagtatcgcttccttctcaaaagaaatataccctgacctaccagccggtattcattatcgtctacgaggaatggccacattacctgagtttcgaaacaaccacgctggaagctccttaattcagaatgcagaacaaatcttacaagagcgtcaagcaaatatgttatggtgtaatggccgaattactgtaactgactattacaagcgattaggctttcaggagcatggtgaaatttttgaacttgaaccaattggccttcataaagttttgtataaaaagatataagaaaagctttcctcaatacgggaaagcctttcttatatttcaatcttctctttttatttttttcatatatatgtatataaacaaactaggaactaaaaaacaagcaaacataataagtcctgtcatactaatttcctttatcgaaatatctggtgttacaacgatacaaatagctaaaatcccaataataatacccaccggaatgaataatagcttcataaaataacgacgcgacactccgcccgtatgctcatacacttccactgaatttttcagatttaaaaagttaataattattatcccgcccataaataccattaataaatccgaaacactttcatatcctgccccttgcaagacatagcggtaaaagacgatagctagtatgacgatattttgtaagatgaaagctaatctaatatgttttaacccttcaatcattaaacgttcatctttcacgattttcatcctaccactccttttcctcccaaaacaaatcattcaacgttttatctactgcataacaaatttttaaacataaatctaaagatggattgtatttccccttctcaattaaactaatcgtttgccttgtaacgcctactttttctgctaattgttgctgtgttaaatctaactgaacacgcgcgacttttattttacttacagccattcatgttcctcctctatctatattgtaacatatatattccgttaagtaatttatattttacaaaaccaattaagttttcatcttatcccgattggtgcgggctaatacacagtgaggatatcccctactgctcatagtttcactttattatacacaaaaagggagcctcccataagaaggccctctcctatatttatattataagaataaatgacatccaaataagaatgcaaataagtatagtaatggatgtacttccatccctttacccttcacaattttcaagactggatatactaaaaatccaattgcgattccatttgcaatactagatgttaacggaatacctataaaaattaaaaatgctggtaacgcatcttcaaattcattccaattaatatctcgaatgctttgtgccattaaactacctactataattaatgaaggagctgtaatagcggctacacttgataaagaagcaataacaggactaaaaaatgccgttataattgttagaccaacaactacaatccctgttaatccagttttaccacctgcagcaatacctgctgacgattcaatcgtcgctgctgttgggcttgttccaaagatagaacctgtagtcccgccaattgcatccgcaataaacgctttaccaaaacgcttctctgtattgtctgtaattaaacctgcttgtttaattaaaccgagtaatgcacctgttgtatcgaataaaagtacaagtaaaaatgaaaatacaacgccgtataatccgtattcaattacatctgaaaaggcattgattgggtttgaaacgatgataccctctggtaaatgaggcatcgccacaattttatcagcaaacttcaattgccctgtaaagaaggcaataattcctgtcacaatcatactaataaataatgcaccgctcacacgcaatgtcattaataccgccgctaatattaaaccaattaaagttaaaataacagctggagaatgaaaatcaccaatcgtaactaaattagacggatgatccacgataattccagaaaggcgcaatccaataaaagcaataaatagtccaattccacctgcaattgcatgctttaaactatcaggaattgctaaaattaacttttgcctaaacgaagtaaaagataataaaagaaaaataatccccgttacaaatacagctgaaaaggcaactacatatgtaatcccttctgccttctgtacaacagaataagcaaaatatgcattcattcccatagctggagcaataacaattgggtaattcgcgaaaatcgccatacctactgttccaacaacggttgcaataattgttgctgtaaacgcttggtcaaatggtacacctgcatcagataatatttttggattgatgacaagaatatacgcaaatgtaaaaaaagttgtgatgccagctaaaaactcttgcttcacagaagtgttatatttttgtaattgaaacatgcttatgtacccttcctacacctgaattattatcacacattctttttcttactagtatgcgagaaaatataatacttaatcttaacaatcaataaaaagaagagtcaatatattccctaatagttcgaattttaagtttaagtctgacaagtacagatgtagtacagttcattatgattatttttgtagcataacagatagaaatgttttataatttgaaatagttaaatatttagtaaacgcattcaaatatcgttcactctacaagggggattcttcttatgcagcacacaaacaaatctggaactttaaatcgtggtttaaaagaacgacatattactttaatgtcactgggctcagctattggcgttgggctatttttaggatccgcttccgccattaaactagcaggtccttctattttgctaggctatatgattgccggtctcgttatttttttcattatgcgagcgcttggggaaatggcaattgaacaacctgttgctggttcttttagtaaatatgcatatgattatattggaccactcgctggttatattactggttggaattactggttcttatgggttgttacttgtatggctgaaattacagcagctggtatttacatgcagtactggttccctgatatcccgcgctggacttgggcattacttgctctattattaatgagcgcttttaacttcttatcggtaaaagtatttggagaacttgagttttggtttgctctcattaaaattgtcacaattatctgtatgatagtagtcggagctggtattattttattcggattcggaaacggtggtatcgctactggtatttcaaatctttggtcacatggtggctggttcccaaatggattttctgggttactactctccatgcagatggtactattcgcttatttaggcgttgaattaatcggcgttacagctggtgaggctcaaaatccgaagaaaacactcgcaaaggcaattgataacgtattttggagaattctactcttttacgttggggcattattcgttatgatggcaatttatccatggaacgaacttggtgagaaaggcagtccattcgtattaacattccagcaaattggtatcgcaaaagcagcaggtattattaactttgtcgtattaacagcagctctttcttcttgtaacggtggtttatttagtacaggccgtatgctatatacattagctcagcagaaaaaagctcctgaaagatttggtcgtttaaataaaaatggcattccaagccaaggaattgtagcaactgctatcgttttactaattggtgttatattaaactatcttgtacctgcaaaggtatttacatggcttactagcatttcaactttcggtgcaatttggacttggggcattatattagtcgctcaaattaaattccgtaaaagcttgcctactcaaaataaacaaaagttatcatataaaatgcctttatacccattaagctcatatttctcacttgccttccttgcactagtcttatgtataatggcgtattcagaagatacacgaattgcattgattgtcggcccaatttggcttatcggcttagcaatcgtatattacatgaaagggtttcataagattgatgaaacacctaactcaaaaattagttaagcaaaacatcccttccttattacttggaagggatgtttttatatctatataaatatttctcaacaaaattcacggtatttttacaattttttaatattttttatgttttccgtctttatttttacagaaaaataaattacattattaaagcacatatatttattattagggggattcttctatgaagaataaaaaatggattacattttctttagcaacagcaattacactaagtatagggacctcgttcataccgtctacttatgccgaaagctctgtagacccagctcctgaaattgctgcaaaagttgtaaatcaaaacaatgggaagaaagtattatttgataatacacacggtcaaactgctgggacagctgactgggttattgacggcggcttttctgacttcggaaacggcattgcaaaaaacggatatcacgtaaaggaacttcgtaaatcaacacctattacgtacgaagatttaaaagattacaatgtatttatcgtcccagaagctaatattccttacaaaaaatctgagcaggacgctatgttacaatatgtaaaaaatggtggtagtatcttctttattgctgatcattacaatgcagatcgtaataaaaatcgctgggactcttctgaagtatttaatggatatagacgcggtgcttgggataatccagcaaaaggaatgtctaatgaagaagcaaattcacaagctatgcaaggagtagaaagctctgattggctctctgacaacttcggtattcgcttccgctacaatgcacttggtgatgtttcagcgaaaacaattgtatcacctgaacaatctttcggaattacaaaaggtgtttcgtctgtagcaatgcatgctggttctactctagcaattacaaacccaaaactagcaaaaggacttgtttaccttccagaaaatccatcaaaatggaataacgctgttgatagtggcgtttataatggcggtggtattgcagaaggcccatatgctgcaattgcaaaagtaggacttggaaaagctgcctttattggtgactcttctcctgttgaagatgctacgccaaagtacgttcgtgaagattctggccaaacaaagaaaacttacgatggttataaagaagaaaacgatgctatcttattagaaaacatcgtaaattggttatcgaataaagagacatttacaagtttagatcaagtaaatggtttacaacttgattcacctacagctctacagacatttgaacagccaagcttatcaacagaaccacaacctgaaccttggggtgcaccaaatgcaggttatcaatggtttaatacaaatactttcaaaccaggttcatacggttataatggtgcggtaacaacaagcgactacgtcgttacacaccctagcattctaccaaacaatgaaattttccaaatgaagattcaagtaaacaacttactacctaatacaacttataacaactattctttaggtatcttcactactggaggaacacaagtggctaaagtacaaaatgcaaacggcacttggccatctacttttggatatagcagtgcattttctttcacaacaaacagcttaggctctgctgagaaagttgtaaatgtacagattgattcaaatacaattggacaagcaacgcttcgtctacgccaaaatacaacaacgaaatataatgaaactgtaacaattaataagaaataataaaaaaggcaatccatacatggattgccttcttctcacttctcttccttcgagaaaaacattcttgaaataacgatacctatactaccgacgattaggaataacactgccctaatcatcatcgatacctctggtaagtcaagtaagaataacttccctaccgttacgactaaaacgactaaaccagcatataatatttcattcatatttctatttcttccaaaccaaaccgcaaataatgcatataccatccataataacgatactgatacactaattacgcttccatctgtagataaaacttcaccgattctcgtaattgtaataaatacaattatcataaaccaatagagcactatagaatacatatatttgccgaagctcgctaatacttctttcgcttctctcatgcaataatagaacgttcctattaaaataagatgagcaacaaagcctgccgaaataaattgatcaaacgggctaaaaatagtctgtatcattccaattgcgtaaaccgtcgcactaacatacaattttatctgttgttttactttaatagaagtgaccatgccgaggaaaccttgtaataatagtacaatcgctgcattcactaaactatactcatataaaattgctaaactaaatgctcccattgcgaaaccaaataagagatttgtaaatgtagaatgtctatttttcctatattcaaatacgaacatagcggcatgcacgattgcactaataattaatccccatgttgtaaaatcaggtatttttgaaatagctagtataaagaacactgcatttgcactaaatatcgccaaacgtggttctagtataaaacttctctccgtaaacatatgccaaaataatagtaaatgaatcaaaccatatacaatcgttaactgtatttgcaagttctctactaacattgacataacagcaaagaaaacgaaaaggacaatggcagcaacagcgtaagaaatcatatataagtatttataacgatttttcaacgcataccataataaactaagtgtcaatactgtctcatatccaaagaaaatataaggattaggagtcgtactatttaacaagaatggtacgaagaacgctccgaccgctacgaaaatagtgagatattccgattgatatcttttcgctaaataaatacctaaaataacccatgcaatattacagagaaacgcgacacttgccggaataaatccatataaataatgtgctgcaaacgttgttagaacaatcccggtaatacttcctccagctaatactaaccctaacgcctgccgctctcttttaatttgaatatctcctatataatacaatccgatagataatacgataccaaacacaattcgtatcgctggtgttaataagccagcatctacccctgctttaaataaccagatcactccaagcaacataataccgacaaatacacgcggtaaccatgtttgacaaaacttaataatattaaatggctctggtttaaaagcagatatatctacttgttttacctgacgttcttgcaaaggctcttttatcttaactatttcttcttttggcttttcctccattaccgtttcaatatattctttcttgttcttactaacatgttgctgagcgttttctacttctatttccctttgctttacttttaattcagcaagtgcttcttgaattgtttcaattgccgtttcgagtgcttctattttcttatccaaatccttcttcatacgctccccctcattcgtaactctcattaaacctatatattaccaattatctttatcatactcttagtctattcattttcaatagtatttttccaaaaaaagaaaggcgtcttcccaaaataggaaaacacctttttactcatttattcttatttagaacaatgctaacgatgaaaccaagacacatgcctacaatagctggaacaatccacccaacaccttctgtataaaacggaatgtattttaatgctgacgtccactgattcatcattacatttttatttaaaatatcaattgcactaaatatcgctacaaccaaaacagttactgcatatacgtatgcatactttccaatatactgatggaataaccctagaataataagcgttaacgcaattggataaataaatccaagaattggtactgatacttttaaaatttgcgttaaccctaaattagctaaaatcatactaacaacgcttactataaatgcccacaatttataagatactttcggaaatgcactcgcaaaaaattgactacaagacgtaacaagtccaattgaaacacataaacacgcgatagtaaaaataagacctaataaaacgactccgccctgtccaaataatgtaatcataacttgtgctaacactttcgcaccgttatcaaatgttcctaatgagccactaattgcccccacatatccaaggatgacataaataatcgataataataatcctgccccaatgccagcaatactcatatatttcgctaaacctttatcatcttcaataccctttgcacgtaatgcatttgcaataacaattccaaagattaaagcagctaacgcatccattgttaaatatccatctaaaaacccttgaaacataggagcttgtccatagttccctattggttctttcatatctcctaccgttgtaaacatactctttataaaaatgagtgcaatcatacataataataacggcgtcaagacttttccaaacaaccccattaatttagatggggataaacttaaccagtaaacaatactaaagaaaataactgtgtaaaacaataataatccgtttcctgcttcagggaataactgacctggccccatttcaaaagctaaacttcccgcacgtggtataccaagcccaggtccaataaatacatacacgatacatggaaaaataattgcaaatgaagaatgaaccctacccgctaacgtttgaaaacttcctgcttttgcaatagagataacacctaatataggaagacctgttgctgatataataaaccctactaatgaaatccaaacatgttctcctgcttcatatccaaggaaaggtggaaatataagattccctgctccaaagaacatagagaataacataaggctaataagtaaaatttcttttttctctaacaatttcatttctttctccttctttaatttcatcttttatgaaatcaatttcacatataaaaagtacaataacccgcttccttacaaagaaaacatagtccatagtctatcacaaaagaaacacccattctatagctattcctcttttccaatttcttctgaaaaatcaacctttattgacttataatagttaataaggtaaaatattaaatgtacgaaattattaactttgtttttgtttgtgtcaggaggaaaataacatggaatcagcgatacaactagaaagagaacaacaaagaaaaaagaaacatcctccaggtttatacttactcttctttacagaaatgtgggaaagatttagttactatggattacgaggattattaacattatatttaacgacagctttagtaagcggtggtcttgggtttagtcccgcatgggcactctctatttacggattttatactggagcctgttatttcacaccaatgattggtggatacttaacagaccgttttctaggtagacgaaaagcaatcacaattggtggtataacaatggcaatcggtaaccttacactatttgccttgcaaaaccaattaggcctatacctcggattagcgcttattattataggtaacggattcttcaaaccgaacatctctacactggttggagaattatacgaagagaacgatccaaaacgtgatagtgcatttaccattttctatatgggtattaacgtcgggtcatttttagctccactcgtttgcggatttttatcagaaaatttattcaaaacaacagttgatggcgttgtacattacggattccgttacggtttcttagccgcttcaatcggaatgatcattggacaaattttatttacaacactatcaaatcgcttccttggtaatatcggtaaaaaaccaactcgcgatttacaaacagctgctggacaaccatcagtaggagatacaccgttaacaaaaaaagaaaaacaacgtaccgcagttatcgtcattttaacatgcttcgttgtcttcttctgggctggctttgaacaagctggtagctcattaacattatatacaaacaaatttgtagaccgctctgtgttcggatgggaagttccaacatcttggttccaatcggtcaatccattatttattattttacttgctccagtcatttctgcattatgggcaaaacttgcaactcgcaagcaaggtgatttaaaaatcccaactaaaatgggacttggtatgatcttactcggtatcggttatatcattctcgttatcgctacattaaaaacaggtagtgatgaacataacattacagaaaaagcaaacttactgtttatcgtctttacgtatcttttccatacgttaggtgagctattcttatcacctgtcggactatcaatggttagtgcgcttgctccggtaaaattagcatctttattaatgggtgtatggctagcaagttcaggtatcgccaacattttaggcggacaactcgcaagcttcacaacttcacttggatacgctgaagtattcacagttattggcgctgtggcaattgtattaggctgtgttttattattaatttctaagaaattagtgaaatggatggattaaaaaagatgaggaatttctcctcatcttttttatgctgttttacctttttctattgcttgttcgtacagctctttatgttctttatattcacttggtacgaaactcttatagaagaatgagaaccagctgtctccttttttatacccttcttctcgaatttccgctgcttttttattcgatttaaatccttcagtaaaccacttctttaacaattcatttcgttcatacttagcaggaacttttaaatcatagttttcaaatgcatacttatagccagccttttctactgccttttttgtagacttatagcctttttcatacgctgtttcatatgccttcacgtatacttctttctctctattttcaggattcttttcagctagttctttccctgtcttttcccctaattcagcttgctctttttcaattttttctgttctttctttattccctactttgaacccgtctgcaaagtttaccttaaactctggagcaacttgactatcgtccatcgtctcttgtgctaaaccttgttcttttcctttttcaaaatgcgttttcttctgctcttctaaagaccatgcggctgcataagtcgctttaaacgcttgtttatatgcatcagattttccagctacatgcacttctgcatcattttttcctgctttaaaatcagtttctccattcttttgaccttcaagttgacctttttccatatcagcttggcgctgcgcttcctcttgcttacgtgcctcttcagcttttctttgttcctcggctacacgttgtctctcttcttcagctttacgctgtgcttctgcagcacgttgtttttcagcctcagtattgcgctgtgcttctgcttgtctctcagcttctacagcactattattattctgactaggagctgggctcgttgcgccactactagaagctggtttattgtgataatgatattccccgtactgtaatccccacttctcacaatttgtacgacacgtatgtccgccattagcatctgtacgccctggatgcgcataagctgaaattggagctaccaataacgctatactcgttgttaaaagaagtttcttcacctgttgtctcactcttgttcctcccaaaatatagaattctaactttattatacataaatagaagaatacttaaatacgaaccgaaatattctattatttctcaacattagtaaaaaagaaggtgaactctttaaagagttcaccttcttttttacttcttcgccttcgttcctactaaatcaccagcaacaacataacgcttagaattatcctttacagatacacatgtaataagcgttatctcatctttcccatgatcctctacaacttcccacttatcaggagtcacttcagatacaccagtaaccgcatactcatattcattttcattgtcatacaaataaattttatcgccttttttcaaagaagctatatcactaaataaaacaccttttttagacatattatgtcctgctaatgcgtaatttccttttcccataacttgattctcttttactgtcgctgcacctgataataagtttttttcagtagaagcttttaaaacaggcagttctactgaaacacttggaatcgaaatacgaccaattacttgtttcttatctaatgatgcattcgctacttccgccaagtctggttgattaattttggaagcatctacaaattccgtctcatgcttttcataatccatcttttgaacagcctgcacattttcagtctgtttcttttcagcctgatatccatcataaaatggctttccaattaacacgccacctacaacaaatagcagaattgctactatactataaattctttgcttattcatacacagttcctttcccttacaaaatcttactctatataaaatgataaaataatatcgtcatatgtacaagtattagcttaaaaagaaaccttcttgccggtgcaagaaggtttctttttaagctaatttatttctgtatagtgatacgtgaaatactgtcatttgaataaagaaaatagaaaatagaatatataatgggtatccaggaagatattcattaataataggcgaaaaagttaaaaatccaactgcacaaggtaacacaaaccataacgatacaaatgttgttcggcaagctttatccgtaatcgctttttcacgttcatcttctagcggaaataataatggatacatccaaaaagataaattcttatattttttcttttgaattctataaaaaattgtaactataattgctccaataaataataaaatgaatggtactccattaaaccatacttcaaatgggaatttctcgtttttaattatatgtgctaactctgtaataacactataaaattcaacaaatgtccaacatgctagtgcagtatagagtacatttataatataagaaaaaacaattctattcatcctcttctccctccttatttaaaacaaacacatcttccatctttaactggaacacatcacaaatcgtaagtgctaataacaacgaaggaacgtaatcccctttttcaattgctgcaattgtttgtctcgttactccaaccttttctgctaatacgctttgcgtaaagttaaaacgagctcttaattcttttactctgtttaaaatggtcaaatttaccacctctcaccattattgtatgctattcttaacaaaatgtaaactcaacttaacattattattataaaaaaatccaactctacgtattgtaaagttggattacttgttagtttaaaattgtaactttaactgttcttctgccccagctacttgatgaacctttatctggcattaaaacatcaattctatgccctttaatagccccaccagtatcggctgcaattgctactccataaccttcaacatttacagtcttacctaatggaataacatttggatctacagcaattaatttcattcctgggtttgcagttagattataacctttaccacctggtccccatgcagaaaatacttgttgacctggtgcataaccattttcccctggatcagctgtataagctgtagcttctacataaatttctttcccaccagcagttggcttagaagatggttcaggttgtgcaggttctaccttcgaattattattagcaactggttcagctggtttactagctttttcctgcttttgcttttcagcaatttctgcttgtgctttcgctaaagcttcttgctctgcttttgcagctgcttctgcttttgcacgctcttccgctgcgattcttgctgcttcttgctcacgagcaatcgtttcttgtactgtcttcatatttgattcaattttagctttttcttccgctgctaaattaagttgacttgcaacttcattatatttagcttgaactgtttgtaagttatcttgacgctttttcaagttatcttgcagttcagcttgcgcttttgctaatttttgtttgtctactactaaagatgcttctttttcgtcaattgttttcttatcttcttcaatttgacgaagatcttgttcttgtagacgtaaaatttctttatcagcttctagaatagtagaaactgcgttcatacgttgtaagaagtctgcaaagttttttgattctactacaacttctactactaaacttgtatttgaactgttttgaacagaaaccatacgttttctcataatatctttacgagcaaggactttatcctccaaaacgacaatttcttgctttttttgctcaatctgcttatgtgtttcatcgattttacgttgaatagcagcttgatcctctttattttttgcaattgtattatttaaattatgtagttcgttttcgatacctttaatttctttactaacagcttgcttctcttgctctttcttttgcatttctgcatcgttttgttgcaattgctgttgcatgttgttaagtttctcgtcgtttgactctgctttaacagcgactgtactagaaagaccgataattcctgctaatactagacagctgattcgcttaaaatagttcataatccgactcccttcttatacagttatacatgatttattttacagtttgtttacaaaacgattaaatacagtttatttttcgtgacgaaaaaaagagaattatgaataaaatgtaatagattcttaaatatttaacaattcctatatttaaaaaatacaaaagatgctaaaatccaaatatagagaaaatataactttcgaaggcggttgaaataaatacatgtttactcaaaaaaaatcactccaacatacaattgctcaattacaagagcgtatacaagaattagaagcagaattaaaacaaaaagatatcgaaaagcaggagactatttctactatccacgatcgtgtacaaagcgttatccaagagcatcaacttgtaaataaccaacataatacacttcaaaatttagttcaacaattaagttcatgtttcgaaaatgtttcaacacgtacaacacattccaatgagttaaataatgaaatgttacaaaaggaacaaagcttaattcagtctattgcagaaattattgactgctctaatgaaggaaaagaatccgttcaccgcttacttattgtaattaataaattaggtgaacaatctcaacgcacgtctaatagtatgaatcatctaagcgaacgctcaaaggaaatcgagcaaattgtagaagtcattcaaaacattgcagcacaaacaaatttacttgcattaaatgcgagtattgaagccgcgcgtgctggagagcacggtaaaggattcgctgtcgttgccaatgaagtaagaaaactagcggaaagtacagcagaaagtacaaaaaacatcggcaacttaacgaaaaaaattcaagaagaaattgaaaaagcatatgataacacaaaagataatttacatttagtcgatgaaggtgtagaaatgagcgccgatacaaatgctagaattgaaaatattttagttatgattcaaacgttacaaaatggtgctacaaatgttattaaggctatcgaaaaccaaaagtcttgtaatgatgacatattacgagaatttgctaacacacaacaaatgttccaaaaattaaatactactattatgaatcatattcatgatgctgaaaaagtcgatgttcaattgtctaaaagtcttcaaggaacagtgacttcttaattaaaattaagaatcccttatactgctataagggatttttattttatttagaatatttatttcttttcaatattcatccatatctttgttatactggaaaagttgtttctttcaactaataaacaaggaggttattatggaacaattttactacgttttaaaatatttaattctcggtctgttccaaggattaacagaaccaattccgatttcttcaagtggtcatctcgttttagcacaacatttgctaggactaaaaatagaagggtttagcttcgaactacttgttaattcagcttcattattagctgtattacttatttatagaaatgatttaattcgtctaacgaagaatggtctctcttatatatttacaagagcagaagacgcaaaatcagatttcttctttattatttatcttgttattgcaaccattccagcaggtgttattggtgttttatttaaagattacatcgatcagtacttaaaaggtgtgaagatggttgggatttcccttcttattactgctgtcggcctttggattattagaaatttacgcggtcgtaaaaatgatggcgacctttctatgaaagatgcaatcatcgtcggattagcacaagcttgcgcactgattcccggaataagccgatctggtgccacaatcgtagcagcaatgttacttggtatgaagcaagaaacagctcttcgcttctcattcttactatacattcctgttagcttaggtggcttattgttaagcattacagacattgcaaatgatccaaatctagacacattattcgtaccatatgtcgttgcattcatcgcaacatttatcatgacgtatatttcactaaaatggtttatgaacattatggcaaaaggaaatttaaaatatttctctttctattgtattatcgtaggtgtacttactcttattttcttataaagtaaaacttacaaattaaaagcgagtcatctagtgtaatagaatgactcgcttttttatacctttattaagttaaaacctattatttacttataattttcagaatagtataatatttatcaagttcactattacagtaattctatctttcctactattatcgtaaaagaggtgtttatatgtttatagttactaaactcattcacattaagtacgaatatgaaaatgagctactttatgggcttaaacaatattatccttcccccggaacgaacggttgtattaacatagagttttcacctgttcatcgtacaaatgataaggcagagtatatgattcgtatgttatggaaaacacaacaagattaccatacatggctttctcaaaaagaaggcaatgaaactttgaagcacaaaatacaaggctatatcctttcttccaaatcaaatgctacctatgtgcattaatccttctctttttattccttacgagggccaaaatgataaagttaaattaatcagccctcatcaattgggctgttcacaaataacgagataaggaccctcttacttttcatactgtaagagggcttctcttatgcatacactttcttctcttgacaatacaaacgaataacatgtttattttgttgaaatacatcatgcgtcagccgaataataataaagtttcgttttgtttgatcatcatgaacaaaaatctgttctccctcctgaaaacgccatgcactttcaaaagtcgtaatatgatccccacttacagaaaaaagttcatatcgcatctcttgtaccctctctcaacttatataatcacaatatccttatattaaatttattataacttaatccctatcaaattagtaattttttctatttcgaaaggttttaactttgtatttaaatatttttagcgctataatgataaacgaatttttattgaaaggagttttactttgactgcatatttatttccagtgaaaacagcatttattttatttccttttttagcaatgtttcttttaatcccttttttaatatttaattatcgaaaatacggttatttaaataaatggcgctcatttattttatactcattattactttacttattaaatgcctattttcttgttattttgccgttgccacaaacgtttgatacttgtagcctacaaccggctaatacacaacacatgcaactcgcaccattttatttcatacaagagattagtagtcatacatcggcagttttaacgaaaccagctacttatttctacttattaaaagagtctgcgtttttacaagttgcctttaacgttctattaactgttccattcggtatttacttacgttattatttccgacgtagtttcttacaaacaatttgcatttcctttttcctttcactatttttcgagctaacacaagtgactggattatacggtatatacaattgtgcataccgattatttgatatcgatgatttgtttttaaatacattaggtggcgtaattggttttatcattgcaccaatatttacgtacttccttccgaagacaaacgagttagatagtcatattgatttggaaacgaaaccagtcggattcattcgtcgccttatcgcgatgcaaattgattggattttcttatctatcgtcgtacctgtcgttaaaaacaaaggaaattctttcttcgtttctaatatgcaatcttacaccaatatgtatgaactcattttcattacgtgttcaatccttatttactttattattattccatactttactaacggaaaaacaattgggaaagcattgcttcgcattcacgtgaaaggaaaatcaaatcgtattacattaaaagaactatttattcgttacggtatattttattttgcattaggtggaatcaattatattctttctagtagctctattttaaatcacacagagcctttagtattactcgttacattattattcctattcatcattaacggcctatttattattcatgttttactgcatgtatttagccgtgataaactactattttatgaacatattagtcatacaagaaatgcaattacactaaaaaaaggtgacaaataattatttgtcacctttttcatatacataatgtgaaactttaattagccctcaccaaccgggcggttatctcccaccgaattttgcgacgagagtgttactgcccgacaaatagcgggataaataacttttctgcataaggattaaaaaacattccaagttcatctagagatttcctcacctgtaaaaacgaatgaaattctggatatatatattgtaattgctcatatgataatgtatgcattttcccccaatgtggacgcccttcatactttagaaaaatcttttccacttcgccaaagtaagcagcatatttcatacctttatacatatgaacagcgatatatgctgaatctcttccataggccggactaagccatatatcatcccctttcacataacggcattcgattgggaagtgcaccttatactttttcttttcaataagatttgagatttcttctacaaccgtcctcatatactttgaaggaatgctatactccatttcataaaatggcaccgtacgtgatgtagcaaatacttcatagctcgggccaattatttttgtgtttggtacagctttagctgataaccgactcacgcctttacttatagaaggaaaccatttacatcctttagatagtaaagagaacatcctattttcaagtaactccacctttagtttatgccatttcaaatcactgcctttattcgttgtttcgttcgtaagtttcacttgtacttcatcagaataaggaaaaacgaaaaattcaaaatgacgatgcttcttatattcttctagtttgttcattacagtggataatgactgtttttcactttcataaacgagtgaatacgctggaataaccttcaattttatctttacaatgatacctaacattccaagtgacaactgaaacgctctccaatattctacgttctcagcttccgaacaaactatactctcaccattagatagaactgccgtaatctctataacttgtgttgataaactcccaaaggtaatacctgttccatgagtccccgtactaatcgctcctgcaatagattgcgaatcaatatcccctaaattttcttgcgcataacctttttcctcaagtaacttccctaaatcatataactttgttcctgcccatacttcagcaaccatcttctctgcatcaatattcacaatacccttcaattcatctaaagaaactaaaacttcttccgtttgcacaaggggggtaaacgagtgtcctgaaccgacaacacgaattttctttcccttttttcgcgcaagccccacaacttctactacatcttgtatactttctggatacatcgtataatgcggcgttccttctacattccctgtccaatttctccacttttgtccctttatagaaagcattggccatccccccgatatgttgaatactccccgacaatctctccttttttaacacgatacaaaaaaggaaagcgttcacataattcaccagccttactatgacgaaacaaaatggtctctcctatatccactcgttcctcgccgttataaaaaattggcgtttgtacctcgccagcaccttctaaagctaataattttgcacccttcggtctccaaacttcaggctctttatcttttccaactgctcctgaagcaatatatccaccacctaggcaagtgtaaataaacgggactggtttacgtacaactggtaaggcaaatccgaccgctggatgaaatttcacctctttataataatcaaacagcttcggagaataaaaagcagaacctattgtaatctctgaaactgaattatctttctcggttatttttatgcttcctgttccgcctccatttacaaaccttagctcaataccaatgttttgtattgcttttacaatatgttctcttctttctttaacttctagcactgatttctgctttaaatacgaaatcactttacttttcaaccattgattcggtatataatcgcccaccccggcaatttgagcttcatatcccattacaccatctaacattaaatatgatgaccttctcaccttttctactactttcaacgcatcctgcacattttttactggggacctttgtacaccaaaatgaaattgaaagaagcgactactcatatcaatatccaaacaaacacgaaaacatcctttagattgctcagcaatgttttctaaatacacaatatgctcttcacaatccaccatacaagttataatgaaacctttctttgttaacaaactaatttcatacagagctctttcatcgtaagcaggatatccaagcaataaatcattaaatccttgttctattaaaaataaaatctctctaggtgaaaagcacataataccttgaaatcgatcatttgcagctagtatcttttgcataatcggaacagagcgtaacgatttactcgctatacgaatctttttatttccacttaactctataatcgattgaatatttctatctaaagccacttcatccaaaaatgcacacggtaatggaacttctttaaaaattcctcgatccacatttttctctcctcttctcaatatgtcttatacatattggaaagaaagtgtgattttcctgtttgcaaataaaaaaagtttcttctttacgaagaaactttttgaaactacttcatagaaatagtcgcctctactggataatgatcagagtaatcattgatatataaaactttaatttccaaaaagcgcacaaaacatctatattaagcagttttacgctacatcaaaaaatataaatggcaacacttttctggttgtttgtgaccatattcgttaccgaaaaaatagaaattaaactaataaaaaaataaaagagcacagcgtgttaataaagtggtggaacactttattaaccgtccgcctaacgtaactaggcaaacacttgctgtaactctttatgtaccttattttatcgtacataagggttcctccgcaacagtttgcttacattttgtggcatactgttgcttttttacttttaaaggagacgagcccttatgaaaaagaaacaagcaattactattcttgctagtacagaaacatacgaaaacttagtatcttttcaaactctcaaggaattaaatgacactgtacgtgcatataaaaagcaatttgctgaccaattaaataaaaatcaattagctgtattaaataaattacacaattattcttctaaatttcttggtgtatctttcagaacgaaaaaacacattgccgaagatcttgatattagccgtagaactgttatccgtgcatgccactacttagaatcacttggcattattaagcaactggaaatgaaacgtaagagtgacatgagacaaacgagtaatataatcattattcagccaattattacggaagaacaacttgtcacagaagcccctactaaaactgtggaaatttgtcacaccaagaaaacaactacaaaaaccttaaaacaaaagataaaagatataaataaacgtaaagaagaagtttcgcaatcttttcaacatgatttagacttcatcgattatcgtgtgccacaatctatgcgtatggaattacaaactgctttttcacccaatgtgattaatgaatctttcaaaaatgccagaaacattgcaaagaaggctgcaaaacaatttaatttattagcagatacagatgtatttcacacccttcttgcaaatgcttcttctgttttgtactttaaaacacataagtacgagcataatggaaaatcgatgaaaaatcctattggatactttactcgaacgttcaaaaaaatcgtctataactacattgatagctttagagagatacataaccttgcaaatcgtaaggcaaataaatataatggactagcttttttcaaagaatttattgatggttaacttgttatgtcttaacaaccatttgattcatgaaatcgtgaatggatttagcttgaaatatgcgaaaatttgaagaggagatgtcatactggctatcggtaattaccagaagagaagggaagtatttcgatttcttgggttgccatggttcttgttgccattccaaactatgaaagtaaaattcatatcggtttaatttctcttgcattactttcttactgtataccgaattctgcacttctatgaaaaatggagattgtcgccaaattgcaaatatgtctggctccatatatgctttaccatacttcggctcgactttaaacaatttaggcttttcgtactgaagaagttgcttatatacattcacaatagcaaggaagtgcggaatcttttgacttgtttttcgaatcggactcggttgtggaaagtagatatatggtttctgtaacacatttacttccacactcccatctcgacttaatcgtttcataaccgtattgcaactggtcacagctttcttgagtccttggaaatgcaaatcgataatatcatctcgtgataggcatctaaagcggcataagtcttttataatcgctttatctctactcttcatgttccaacactccaaacaaaggaagttcttgttgtagcgaattctgaaacgttatatcttctttgagtaaacggtaaggttcaactatttgctttgctttattaagttctaaataaggagcttgcactttctttaatccatttaactttaaaatcatttggccagattgttctaagtgttctgatccagatgtacccataatattactattaattgtgttatcgcatttaaagcccattctaaccgtcatatttagctttaacttaccatctaacacctttgcatctggtctttgcatagatagcatgaggaatacgcctagtgcccgaccaactgccgatattttttctattgtcgtcatacattctttttcatcttgtagcatcgctacttcatcaatagctaacagaatatagggtttctgtttatcaggatttaatttattgtactcatcaatgtgatccacttcatattcttccatgagctttctgcgttccctgatttcattccaaaccttatgaagcatgactttcatttcaatttcttccatgcacacttctttcacatgttttactctacgcaagaaatgaaattcagaatttttcaagtcgcctaggtacaaatataatttatcaggagacacgcattgaatgagtgtagatagtacaacacgtaccatgctactttttccgctacctgtttctcctgcaatgagtaaatggggtgtattggggtttaccatatcataaacaagcatgtttccaaactggtcacgccctactacaataggaagacggcattcttttatgaatggctgccattgcttataactgtagttgtattgtttcaaaccacaatcagaatgaaatacattgagcacaaactttttaatatctccctcaattgctacattccgtccaaatatttgttgaaagcaaaaccatttcttttcaattgtctttggatctaatccgttggggatagtaaatacatatttcacgctttcgtttgaagaaaaaacagcatgaacctttggataaattgggattttccctccacgtgtttgatgttccgtatataaacctgccttttggaacacctcaataatctggtgctttaaagacctcttatgaagccattcttttatgattcccatgacaagcctcctagaacataattacaattcgaacaaatacataggtaatgaatcccactccaccaattttcacgccataatgaatcccattggataataatttagccgctgatacataatcatttcgtacaagatatctttctaacatgactgccccagttaaagccgttcccattatccctaatgccagatacgtatttaaaatagaatccgacatatgaacaaatgctaacggacttaatgaatgatatctttgtattttctgctctttcattttgtatgatccatccataaatgaacgaaaagggatgacttgctttcttgtaaacatagactccactcctcgtcatttattttttatcgtattccgcacaagactctgagcaatacttttttccattccatctccaaaacaaccaatcggataataaacatttacaatactcacaaatttcttctgatgctgccatcttgatgttcatttctttcgcccctctataaacagaatataaaatctagataaagtaacgcttcacacactcattaccatggtagcgttaccttgataggaaccctggtagctaccgtggtagaaatctaaaacttaccatgatacctaccatggtaaaatcatctgttcctaccttgatagctactttggtaactggaacttctcttaccgtggtaactaccttggtacatcatattagggtgggctcggacaatttctcaaaattttttctaagtttaaaaatttgaggaattggtcattctgttgatgaggtgagtttaaatgttcggtttaggaaaaaagcgtagtaaattcgggaaatggttagataggcagggaattcaacaaattgaacttgaaaaaaaatcaaaattaagtacaggcactatatctagattatgtagtgatacaaaatacaaacccaaatactctacaatatctcaaattgttagaggtttgaagaagttaggaaaaaatatagatgaaaatgatttctggatgtaattagaaaaagaatcttacaattttcttcttaaattggtatgatttaattaatttaagggggcggttttatggagttacgaaaaacagctgatggggaatcattcattattgaattagaagaaaagaaaagttctacagctaatcagttgaagagagttatatattttttaattggatctttcggtttattaatttcagtagtgttatgctttaccataattggaattttaccaggtttaggtttaacattcttttctgcgctctttatatattcagctttaggtaagcaacttgtaaaatgcccaaactgcaacaaaaaacaacctgttgtacataaagctgagggatttgtttgtcgtagatgtaacaaacgtactcttgttgaatggaagaaataaaagggccgtcgtttgacggctctaatttttgttcataaaactattcttttgtataaaagtatttaagtcctttagcatctaaccacgctgttgctttatctagctcgctaccttgacgataatccgactcaaaataaacaagcccctgacgatctccacgagaaacaatttttgaagtgtatccaagcgtatccatcatttgaatcatttctggaattaaatttacaccaaattcataagtaatcaccttattatgtttgttcacgataatctccactccttcttgtttatacgatttatttgtaaaccaatctaacgacttgcttccaattaatttgtttaaatcacactttccgataccaggaacacttcctgtttcagtgtattgccaaatatcacatggataagctggtctattcccgccatatcgaggaatccatacaaagtcagattttacatttgccattccgaatggagcatacatatgatggccaacatataaaccgactttttgagcacctaatcggcgtagttcatcgataaacgcttgcgtgccggctctcatatcatccattgtttttacttccacatcagccacccagactgttgcactcttgtctccacgattccagaagtctcgagcttctacacgtgcgtcattctcagaaacgaaacgacaaaatgcatagttaccaaaaggaataccatgttgcttcatagcttgtacataccccttatataatggatctacataattcgaaccatcttgtacacgagcgataatgaaatcaatgtattgttttgccacgggccaattaatatcaccattccattttgaaatatctacagtgtaacccattatttatcctctccttcgctatttacatcatgatcagaccaaatccccaatgcgatacctactgtcaacaaataaggtgctaattcatccaaaaagctcttagcttctggcacaccaaatttcgtaaataaaaatccaagcaaagaaaaaaccgcaacccatgttttccagttgcggaatcgttttttgatattttcttttgattgattcataactaatctatctccttttctacattatctaagcgcttatgcgcttgtttggcactctcttcaacccttgtaatacgctctccaagtacaatcatttgcttttcatttgcctttaaatcaatccgaatatcatcaactcctttactgatgtactccaatttcgcgtttgtttctgccccttgtctaccatctgacttaatctctttcgagcgattcagtgaataagacatatatcctatcaatgctgacgcgattgcgataagtactcctacttcaattgtcatttcttcactccttttatgctgcaaagtaacttggatccattccaaatatttctgcaatatcttcttcgcttctatcttttagataagactccgtagttgagatgtcagaatgattggcgagtgattttagtttttcaagtggtacgccttgtactttcaagttatctaatctgctatgtcgaaaacagtgaggattcattttaaattccttcccttccttttcgttcagcatcttagcaaatatgtcgcaccaataattaaatacactcttgttcaatctttttctctcaccattcttataaacacgtacaaacaaatctggaatagtatccttacctcgctgttttatatataaacgaatacatttctgcacccggtgattgtaatataatctaaacttcttaccgcgttttcctcgtaccacatttgtataatattgttctgttaacccttctttttgaacctggtaaacctcattctttctagctgcgctgtaataagaaagcgctaaatacgtagctaacatgtatttttctttttcaagtaattcatcaattaaccaattaatttggtcctcagtaataaatgtaatttctctaattgggttcttaggtaaaccacgcacccttgaacctacattaaactcgtaattataatcatcatcgtctgcacaaaattctagagctgaacgcaatgcacttatcaatccattcacccgagcattagacattcccatctcctgaaaaataatagataaatttcggatgtctttacgtgttatttgtgtatccaatatcactagcgcataagaggaaatcgattactgcatcgttcacattttttttatcaactatcttttttaatctttctatattctttttacccgtctctaacaaaattcctaaagaaattatccaaagcatatatatataacccactttgctagtccctgtatgctctaaatcatctatcgcattataaaaatatacttccattttactaatgtcttctcctaaagaatacattgccctaatatcgttcatctcatgtataaaattcgacaaataattttctaatataatacttttgttatcattaggatatctttgaataccatttttttcatcttcttctaaacttttaatctcttctctattttcttcgataaactctttatgatattctattccccttttacatttttcttctatacataaatgatctctcattctttttaattcctcctcgcttctagattatggccactctccaacgatgttaccctttgcatctatcttaaatgttttaacctttccactactatcaacttttgataatactctttcaactttacctctttgcaaggctttcgtaatctgttcagctaatacttaatctccctcaacagcttttaatattctactttttccagtttcagaacctttcaaccaatcatttgacatttgtcgtccatctttagttttccccaattgtgaactaccaaacttagcttcatctataacgtatttgatctttgattctgcatttgcattttcgtataatccatcaattccttttactattttatcatttatgcctgatggtgcactttttccgactggctttaaatcaaatccagcttcttttaaactttgattattcaataaattgtcactagattttatttcaccataattccctttttttctttttttcataatatttttcttggcttctacaacttttaattgatgttcatttaagtttctagcaacataatgctctctgctactttatcaacttgaaccataccctaaataaaaagcacttgttgcctttagtcgacaatcaagtgctataagtacatatttctgttacaagcgtaattaaatattttttgattattttaacaataattatctctttgtactaatattattttttcgcatagagaatttattcatttttaaaatgaaccatgtcataaggataataagaaatatcttttaatatactatcatctaatcctaaaattttcataattgctccactttcaaaactccaataaccaaaatataatttttcttaatgtttatggcattcataccataccatattattatgcccaacataccattgccctaacaagtattttttcatgaattcacaagattttgtattatcattacacaaaataacattaatcagacttttaaatggcttttcaaataaccagctatattttcgaactgtaatcacttcttaacaactactaatctacctctattatttgtatcccttctttggtttctggacaatcattaatgcttctttttaatactcatcttcaaataaacaattatatatagtaacacctgtttcctttaactctaacgaaacatcctccacttcaatacttaacgtttctttatcaagattctttattccgttactatctaataattttaaaatactacttcctattttcttagattcatcattgtatggcgaggactcttcaactagctcgattgtaccattagtgtatctatatcttaaatatttaaccactgcatatggcgcgattgccgaaatcattagcattacacaattaatttctgattgcttccgaacatactcactgaattctacactaccaaaacgaaatttcacatctagtggtagaagaatgtaagaaaaacatgatgaataactaaaatcagtaatattatcaacgtttatatttgatattttattaatttctccatcccagaaatgtttatcaacaaatttccccaaaacatattggaaatcaccttgtttatataatttattaacaacttttagtatctcatcactcataattattctcctttattgtacagggtatccatgtatatttcctttaccatccatatgaacctttaccctcgtttctccatttggacctattggttttccaaaatcatgtactctaacacttccatctggctttactggtgttcctttcacccatgcttcttgtgtctctactactccattcttccctgctccccactgcgatttggttgagacattattcccatgaccaggaacatgtttaccttgttttcctgcatcaacttttggagcccctgaaacgccagcatcaacatgtccttgacttgctagtttatcattttttccaatgttccctgctacactggctccctggccaccatcaccagtacccttacctccaccagaagactcgattctttgaagagtatccttagcattttgaatcgatttatcccatacaaatccaccatgtacaaaaagacttgccccagtagctgttgctgctatatctaatggaataacaattggtgacgctaatccgccagttcctacttctgcgacgatcgttaagaaattagatccgcctatgagcgaaatagcttcaaacatttctacaatggacccggctattgatataacatttccagccaaccttccagcttggtaagttgtcttactttctaatttatcattctcatgtggttgtagtccaaaaaagttttctagtgctgcatcaccagcaccttgaaaaaattcgataactccatgcaaaaatgtttgcgcataaatggctgttttttcatgccatgatctattgtcttcctgttcttgtaagttcatttcttgtttgtgcaaagtaatttctttcatctcgttttttcgagctgtttcttctataatcccctgaatcgaactcacccaatccatattcaacccttgtgtactaaacgtcccactcacaggactaaatcctttcccgctttgcacttcagcgagtccggctgtgatgctagccgctaattggagggcggtgctgtagttgttgctggatgaatgttcgaattcttgtaaacgctctagtttttcttccagtttttttctcattgcacctaataccgttacaatcgcacttactccgggcatcggtgtaagtacttctattgcttctatacttgtaatcgattgattaattccccgtatttgttctcttatttcttgttcgatcacatctgtcgaagcaactttcgcttggaactcgtttggaaatgcttcgttttggcgaattaattcttcacataagcatatgattccttgcgctaatggccgaaatgtttggacaaggtaggcttttgcactactgtatgtttgtccttgtaatactgtgtctatcgcaaaggcatcaatagattgaatggcttgttccatactttgaatcgtagcattacatatagcgttcatactttgagtttgactttgtacttctcccaaatacatgtttaaactcatgtattggcctccctttgtagttgctgctgttcataggaaaggtcgttttctttctcactgagatgccgtttttctttaagcaacgtctctttttcattttctaattcgaatgtaagttttctttcatactgtccgatttcttgccgcatattcgtaaaaaggtgaaacacttctttgtcgccgtgccaagtttctagtattcggttaaataaacgattacttctatttttccattcatgaaaactaacctcagctcgttcttgattttgcagcgcaattcggttttcattttgttcttcaaatataattcgtaatttttgattacattgactgattctcgtttcaatttcttgactcatcttttctccctaccttttcccctttacgtaggttgttacattattgaaaagtcttttgaagtcctgtatccattttctcaaattcatttgctacggaatggatattatcaattgtttgttgaaaagcagtacaaaattgtttcgtgatctgtaaattttgttgatttgcctcttgtgcttggaagttcacagatagtgtcgtacgcgttgccttatttatagagcgactagtagcactttgcattctatctgaagcatttctcattttcgttgcaagttgcgttgccgtatgcaaattactttgaaattctcccattacttactcccctctaccttttatttacaagaaaattataccacggaaaaatatcccaataaaccgaatgttcgaatttaacatacaattcagcactcttactgaggatgcgagcaacgcttatctatcaacataactgagtccaaaatggattctacttatacaaaaaagatgacttcagccatatgctaaagtcatctttttctaccttattattttactaattctccattataagcttttatattaagcggagcagttaaaaattgtgctgctttactaacgaaagatgtgaagtgttcactcgtattatggctcgcaactgctgcttcatctttccatacttctaccatcgtataaacactttctttttctgtatctttatataaatcataagatacatttccactttcttctcttgaaccgtgaatgagtggctgaatttcttctaaaaatgattgttgttttgctgggtctacttgaaatattgcgtgaataataatcatggtgtttcccctttcatattccatatatttctatgacctaattagattacttccactcagcaactttgtcaattggaagacgtactgattggtaaccactatcagcagcttttccgattgaaattaacattactggtacgtaacgttctttatctagtccaaatgcttctgcgatttggtctttttcaaatccaccaattggacaagtatcgtaaccgtgagcacgagctgctagcataaattgcattgctacaagaccaccgtcaattagcactgtatctttcatgacttctggtgtaaccattgagaagtaagctgaaagttttttcatttgatcttcttttacttctgctggcattaaaccgcgttctactgctgtaccgtaaatttcttctgcgttatcaaagttatttaaatcaccaaataaagcgatcatcgctgaagatgtttctacttgtgattggttgaatttcgcaagtggcgcaagtgttgctttcgcttcgtcactttcaattactaaaaatctccatggttgcatgtttactgaagatggtgcaagtgttgcttctgtaagaatttctgtcatttcttctttgctaattttcactgaagggtcgtacttacgaattgaacgacgtcctgttaaaatttcgttaaaatcatttgtttttactgagttagtcatagttgtattctcccttttttataattcttttatattttcttgaatgtgatttaacatatttaaaagattatcgcgttcttcctcacttaatcctttaaatgcagatgctgcaaaacgttctttttcctcttgaaatgcttgaattttatttcgtccctcttcagtaagagaaactaacgtaattctgttatcatctggatttttacgtcttacaatcatttcattggcctcaagctgctttaaatgccttgttatcgcagcattatcaatattcacttcttgttgaagtgctttttgactaatttcacctacttcatataactgaagtataagctctaatcgagactggctcatacccgtacacccttcaaatttcgaacttacttctttatttagaaagtgtaatttatataaaataatcgcttcttttgagcatgaacttgtcaaattaaccctcctttacaatcaaaataaaaacatttgatgtatcaatagttgatatgtcaattaatataatctatatcgatttagaatgcaagcattttgttttcattttatttttttcaaattaaggcgctttgtagcgttacaaataatgttaattgcactataataatactaatttaaagaactggagagtgattgataatgcggcaatatacaaatagaaatgaggaattgaaaatggaaaatgaaatgaggatattcacaaatgacaacaataaatatagggattgtcgcgcacgtagacgctggcaagacgagtttgactgagcgtattctttatgaaacgaatgtgattaaagaaattggccgagtagatagtggtaatacacaaactgactcaatggaattagaaagacaacgcggaattacgattaaagcatctgtcgtttctttctttattgatgctgtaaaagtaaatgtcattgatacacctggacacgctgattttatcgctgaagtggagcgatcattccgcgttctagacggtgcgattttagttatctctgccgttgaaggtgtgcaagcacaaacaaaaattttaatgcgaacattacagaaactaaacataccgactattttattcgttaataaaattgatcgtagtggcgcaaacactgaaaaagttatgaaacaaataaaagaggttctttcaaatgaagcattccccttctactctgttctaaacgaaggaacgaaagaagcccggatcattgaatacaaatcatatgacgattgtatggaactgttagcaccatttaatgaatcgttacttgaatcatatgtaaataacgaaataataccggacgcactattaagagaaaaactagaacagcaaatacagcaagcgaatgtgtatccaatctttttcggttcagcaatgactggtatgagcgtaacagaacttcttgaaaaacttccggctctcattccaactcttacatcggcacaagaggaaccattatccggtgttgtttttaaaattgaacgtgaaccttctggagaaaaggttgcttatataagagttttttcaggtagcttacatgttagaaaatatgttaatatacagcgcagtaagtctctattccataaagaaaagataaaaaaaatgtgcctatttcataatggagataccgttcaaacttctaccgttcctagcggtgagttttgtaaagtgtgggggctgaatgatattaaaattggtgatattatcggtgaacgtacggattatataaaagatattcactttgccgaaccacaaatggaagctgccattgatgcggtacctaaagagcaaattcataatttatacgctgttcttatggaactctgtgaagaagatccgctcattaaagtttggaaagacgatgttcataatgaactatatattcgccttttcggtgaggtacaaaaagaagtaattgaaacaacactttatgagaaatataatttgcaggttaatttttcaaatacgcgagttgtatgtatcgagaaaccaattggcgtaggcaattctgttgaagtaatgggtgaaaaagagaatccattttacgcaacaatcggattcaaagttgaacgtggtgaacttaattgcggtataacatataaattaggtgttgagctcggctcactacctttagcatttcataaagcgattgaagatacggtatttcaaacgttaaaacaaggattatatgggtgggaagttacagatattatcgtcacgttaacacatactggttatgctagtcctgttacaacagcgagtgactttagaaacttaacaccgctcgttttaatggatgctttaaaacaagctgcaacatatgtatatgaaccagttaatgcgtttgaattaactgtaccggagcaagcaattagtaccgcaatgtataagctcgctgccgttccagcaacttttgcagagcctatattcaataacaattcttatcagttaacaggatcattacctgttgcgaaaacagagagtttcaaacgaatactacattcatttacagaaggagaaggcatatttacaacgaagccagctggtttcacaaaacttatggctcccttccctactcgaaaacgtgttgattataatccgctgaatcgtaaggattatttacttcatgttttgaaggcttattaaagtaaaagaggtgcaattcgcacctcttttgcatgtattaataggttagtttgtcctaacaacttctttaagttttcctattattttcgctatagcctcaattgaattttccgtttcatatcccccaacatttacagaatgatttgcatttttgacaacttcaatctgtaaattcgttttatataactgatcaatttgatctgcattgtattggtgatctttatccccaataactaaaaacccttcgtgtcgactatgtaagataaaatcaaaaattgtatcaaacgtcagtaaaggtgtaagtagtatcatttttgactgcgcgaattcttctctcttcattaaatcatttgcaatcggaattgttccgaatgacttccctaaaaacatagtctcgttgtattgctcatcttttaatacttcatttattacaggattaatatcatccatcattactttcgttacttcttccattggtttattcattaattgtccatcataagaataatgaatatgtacaacatctattttatgttcaagcattaacatcgttgcgtaataaaataacggcttatcataattgtatcctgaacctgaaaacataaaacaaaccgtactagaacctttttcgatatgtgtgtaacgaattactttgtcatttatatgtacctcttttttagtccccttcaccgttttctcctccgaatacgtttacttttgtaatacgatatgttctgtgtgaactgatacatcctttactttctcttttataaatgcaggctgtaagttatatgtatgcagttcttctactggcacccatctaaacaaatacgttctaccctcttcttccaaaatatattgatccgctccactcgcaggtaactcatgtagctctacttcataataaaaactaatttcatgaaactttcgctcagaaagtgtaaagaaattttctactgaccatattaaccttttccttttaataggaacacctatctcttccgcaagctctcgttttaatgcatcttcactattctctagcatttttactctaccgccgggtacatacaaaaaatcttcaccgtcaccttgcagaatgagtattttattatcatgtttacaaattgctccaacgcggtaattaaaacatgtttcctcaactttaaatgtaagatccatccgtaacgcccccttatataaatatcgaattattacaaaacaattatgtaattactgtacaaataaggttactaaatttatccactccattcaatgatttttgaattttctaaactattatttttcatcattacaagtgtatatgcatatgttacaatcatattgcacactagaaaacattatgggggtacggatggaaacgttattaatccagcaaactgagaaatcaaataagttttggaaaatcgttgtgaaagaaaaagactatgttgtgttttacggaaaaattggcacagctggcagtgtgaaagcgaaagagtttgaaacagaagaagaatgtatgaaagaagctaataaactagttgcttccaaacgtaaaaaaggatatacagacccgttgcctggggaagattacataaaagaaaaaacgataacagaagaagaattttgggaactacttaatcgtgcaaaaacgaaaggtgaagaccaagaagaacaaatagaatggcttacttcccaccttgctaaacgtacagtacatgaaattgtagcttttgatacgcatatgcatcgtcttttgaaagattcctatacctcccgtttatgggcagcagcctatattattatgggtggctgttcagatgatactttcgattacttccgcggatggttattatatcaaggaaaagagacatacgaagcttgtattgaagatccagaacgattaattcctgtattagaaaatttgagtgagtatgacgtcccagaaatagaagaactttctttatatttcggtttcactgtatatgcagaaaaaactggtgacgaagatgatacttactttacactttaccatgtcttatctaatgaagaattcgacgatgtagattttgaatttgactggaatgaagacgatgaagaaggtttaaaaaagatgtttcctaagctatgggaactgtatggagaagaaccgtttgagtggtagattcattattcgtgaaaaagtgccttgtttctttagtaacaaggcactttttttgatactatatttaaattatcatctttccactctcccaccactccataaaagtctttaaagaaagagcaacccacgttctactatcattttcatggttccatacatatatatcatctctttgtacttttccattcaaaatggaatagccaaacaaatcaccatttcccccatcagcaaaaaataataaacagtcaaaaggcatgtataaatccttaaaatcaactatatttctcatactcatattttcagttttaatttttgaagcagaccatataaagtcaccgtattcaccttctataccgtttgtttcctgtaataattgatataaatcattcggtaactccacatgtaaacatttttgtatatcagtaagttcatccttcgtagctgggtttttcaagcttaaatttgatgagatactgtgaatggtgtctttccacatcaccttttcctccttatgtgcaatcaagcatactcaaagaactccgctaaatttattgataccatctttctaacaattccttctccctctcgcctgaaatacctgcttttaattcccattcttccgtactctccatccactcatacacatctgtaactgtctcgtctattcttctaaaagtaagcccttcattaaccgcactttcgatacaaatagaaaacccgcctctccacggcttcgtctcaccatctaatgggaaagtttctggaatccacaaaggcatttctgtccaaggctgcacattgtgttcactcataaacgattcgtctacccaaacaaattcagcatcgctattcgtaacttttttacacgtatttaacagctcttccatcgtcaattcatcattcggacctgttatattgaatgtacctgctttattattttctgccatgttgagtccaaatctcgcgacatcttttatatcaactatctgcactggacgattttttcttcctggaactaacacgttacctccttttgctacacgctgaatccagtatggaagtcgatctgtataatcgaacattcctgaaagaagtcctgctcttacgtgtaaaacacgccccggccaatacttctctgcttctttttcgcataatactttcagcgcaccataatgctcataaggagatatttcaccattctctacagcctttatttgctcttccgtcggttcaggttgtaatatatagtcttcttttatgtcatgcggaatccaatctttatatacggaaaggcttgagatgaatatatagtgttcaatattatctttaagcacttctccaacattcctaatatgatgtggagaaaatccacatgtgtctatgacaacatcccacgttcgattttttaaacttgatacatcgttatttctgtcaccggttaactgctccacattagaaaaaatttctttgtttgttcctcggttaaataacgtaatttcatgccctctctgtaaagcctcatctacaaatgctcttcctaaaaatcgtgtaccgcctagaattagaattttcatggttctcccccattcgtgattaataacccttcctaatgtttaacgattttttattgaggaaagttacggggagcgtttaaatttttctacaagttcaccattactcttttaaaagtatatactctttgattaatctccatctatcctttatttctggcacaacttcagaagccatcaccaccaccaattccttctctggaatacaacaaatcatattcccaccatcacccattgcacaatacgaatagacaccctcttcttctcgtaaccaccataagtaaccatattgatttgaattcatcgctattgattcttttatccatgattttgatagtatttgttttccattatgaataccttcattcaaatacagctgtccaaacttagctatatccctaaccgttaacgttagtccccagccgcccgtcgaaataccgtttggatcgtgaacccatcctttcacatcttttccgaataagtcatcgaatccaaatgctttcatattgtagtttggaatttcgctcatgccgagtggttgaaataagtactcattcgcaaattcacgtgcacttttccctgttgcattcgtaatcattgctgatagtacatgcgctcctgcagatgaatatttaaaagctccaatctctccaccgttccccattctatgaagtgtatactgtacccagtctggttgtgtacataattcttctaacggttcctgccagtctacaaaagggtatggagctgtcattgtaagtaggtgtcgcactgttacttcagatgactttactttatattcagggaaaaactctattactttttgatcaacactttttatatagcccttatctatacatattccaattagcgcagagattatcgtttttgtaactgacgctacatgaaatgtatcattttgtccgtaatcgttataatatttttcaaaaataacattacctttccgcactactaacataccattcatattttcatattcttcttttataatctgatctaacttttcagcagttttcattattctttcccctttaacctatgattaaaaaggttcgataggtacatatatatcaactatatgtttatgctttggatgctgctttggattatttctatatacttcaaaaggatacgagtctctcggtttatatccgctatttggcagccattcaccgtataagaaatcccatgctcctttatattcatcttggaatatttcaaaatgtcctactgcatattttccagaaggtattaccattattccaacgtcgttcgtttctactgtggattcatctgaaattgttacacatagacttgttcttaaatgatagtcctcagtaaattcatgatgatcgtggtaaatggttaatactttcgtatcctcaaatacatgatagtttttcttcgccgcgtaacgaaataatttttctatcatttctggaaaagctatagctaactctttatatgtacctgtatgtcttatgtatgcgacgtttatatcgtccgctgttacaatttcaacatttcctcgaaccttcttacattcattgtattgaggaattccccttacgtctttgcaattcttgctattatcgtttcgatattgagacggacttacaccgtaatgacttttaaatgttcgggaaaaaactgctgaatctgtgaatccgaagtgatacgcaatatctgtaatcgtcatgtctgcgcgatatgtaagtagatgtgttgccctttctagtttcaagcgattcacataccgagataatggctcatcaactattcctttaaaaatccgatgaaaatgatacttcgaaaatcctgctatatcagctagctcttcaatggataatgaactgtctatgtttgattctatataatcttgaaccttatgtatgcgtcttacatactcatttctactctgtttattctccatactctttatctcctcacaacaaaaagaaccatcctagaatacttttaggacggctttctattcgtaatagattcttccatattctattgttaaatcgatataatttcactatattttttaaattgatggtaatgtggcagtatcccgatttaattgaaagaaacaactatttttttatagccctacgcaaattaataatattattgggatttagctcccattgtctcataagttctttttgtcttgtttttaagtcttcaaatggttcttccactatgtcgattttattaaatttcccttcgaaaactaaagcattttttatctttttatatccaccaaaacctaagtcatcatttagtaaccagactactctctgtatttttgcgaataaaataccacctgtacacattggacacggttccaacgtgctataaatagtaaacttctcattttttatttttgcatcaaacattgcttcccctgcattgcgaatagcgtctatctctgcgtgagctgttatgtctttttgtggatgcactctatttcttcctcttgcaatgacattattatttccatcaacaataactgctcctactggatatgtgttttcttttaatgccttttctgcttcttccaatgccatctccaaaaaatatctatctctttcaaaatgcatataaatccccttcttttgatgaaattattttatagaaattgcttttgacatcccactcacttctatcaaattaacaaaataaaaaaagatatcattatgtctgcaacaacagggcaagaatggtgttttgatataaacttaatttaatagaatttgtgatacaatccaatcgccattaagctaagaaaaacaaataccctaaaacgagaaattttaagggatcataaaattttcaaatttttaattcttgttttgacgtttcttttgtatgctccctataaccccaaatacaatcgctactgctaaacatacgattgagaaagtttgtaatacgtttgtcgaaaaatagcctacccctaacactactgctaaaacgattcctgctactaacattctccgttgctgcatatccatgcaatcattccccttttatctacacatgtttcaaaaataaaactctactcccgccattcccatcataatttgtatgtaccgatacaccctctacctcatcatccccagcctcaattcgaaaaccgatttcttgatgaaactgtatcgactttttattagttggtgacgtaattgcttttacaactttacgattatttgcacgagcgacatcaaagaaataagaatacaatgtcgatgcgattcctcttcttctatacttcggatttacaccgataaaatgaacgtatgcttcatctttatatgtttgtgaaaaaaatccgcataagaaacctaacgtttcaccctcttcttcaatgataaaactcgtttcttgaaagtgaacaaaaaacagttttggcaacatggcaaccatgtctctcccgccccaccaatcatttaaaactgaatgaatctttacataatcttccccttggatatttcttactcgcatatgtttctccctctcactcacttcattttttcataaattttaatgactgtttctactaataggatgaatacccatatcccgcaaaatacaagaacagactggaatatagatccaattatcataacaccaactgtacctgttattgaaaaagatattccaccaagccctggatcttgtataaatgctccagcagaaaaagcagttataattgatactattaaataaataacactcgttatttttaatatctttatagaaagatacgaggttttttcttgttccacttgtgataattcgatttccccgctctcaattcctttttgcaaacagtcttcacatagaaattcttccttaatttttttaccaccgtgcatcgtacctgttatttctttacatcttgaacattttcgatttatcatgttgttatcactccaatctgttaagattatacttatacaattctacgtttaccttaatattccttttatgtattttatagagaaaggtcgtgttttatgatttcaaaactcacatttggctctaaaaaaattaacgttcattatacattaaggcctagttgttatgcgattatttttcaatcatcttcttcaaagattgctgttatccaaaaaggagaccgttactttttacctggtggcggtatggaaggtaatgaaacaaaagaagaatgtttgcaccgtgaactactagaggaattaggatgggcaattaaaattgatcagtatatcggtaatgcggctcgatatttttatgcagaaaaggaagatatatattatttaaacgatggatttttttatattgcgaatatggtgcagaaacaaactgaaaactgtgaggaggatcatgttctaaggtggatgtctccattgcatgctatagagcttctcatacacgatcatcaaaaatgggccgttgaacaagcgcttttattacaaaaacaaaaaggatctccttctatatgaaagagatcctttttactgttaacttacttttttcaaattgagagcaggctttttcattccacctttttttacaacatataagccgataaaaataataagtccgccaacgagttgcatcaaattaatttgctctccaatggttactgccgcaaagatcactgcaaacaatggcacaagatacatataaaccattactttcgttgagcctattttactaataccgacataccacattgcaagtccgaagatggtcgcaaagatgattgaatatgcaagcgatccccagcttggcgtatctactggccacgttaaagaatttacgttgaataaacagtatataactagcggtacaattccaattaaagtagaccatgatgtgactctcattgcggagtattttgtaataagaggttgcgctaatattggataccatccccacgcaattgctgcgactaatccaattacatttccgagccacgcatactcgtaagtagctcctcctgtatgtcctgttaataaaacgaatgctgcaccaataaaggctacgattgaaccaatttgtactttcatcgaaaaacgttcttgtttgtgcaatactgctaatatccctgtaaaaataggtgacattgcaattaataatgaagcgttcgttgctgaagtatatttcacagatagcataaacatcgtttgatacattgtcgttccaacgatgccgactgctactaatcgtaaccaatcttttctttcaatacgtaatgagcgttccatcataaaagtaataagtaataataccggtgacgctactaaaaatcgtaaactattaaattgaatggatgacatatatgccacgccatactttcctattgtataatttgctccccatactaatgcaacagatactaggagccattccatttgccatcgtttcatccgaatctccccttccatatttagcatagtaaaattggctggatataacaccgtccaattggctgtttttttacccagccaatttgttatactgaatgtatataagagatgcggaggcgtttgtatggaatggaagctagataacgacagtaaaatccccatttatcagcaagttgttgactttattgaaaaacgtattacatacggagaacttcctccaggaagcttcctaccttccgaacgaaaattagctacacagttaaatgtaaaccgaagtacagtaacgactgcttataacgaactacgtgctatgggaattgtagaaagtacgactggtaaaggtacacgtgtaagtacacatatgtggggcgtttctccaacattaacgccgaactggagaaatttcgtagaaggcggtacgttcttaccaaacttaccgttacttcgccatattcgggcagaagtacaacaaaatgaaaatattattgatttcgcaaacggagaactcggttgtaatctctacccacacgatcaactacaaacaattttacgagaacaaccgttaacacattcattaagttatgatcatccacaaggctatcttccgctcagacaagcggttgtaaaatatatgagggaatatttaaaagttgaagcaactgagcaatccattatgattacatctggcgcacagcaagcacttcacctgatcgtacaatgtttattaaatccaggtgatgctgttgctttcgaaagtccttcacactgttattccctgcctctattccaatcagcaggtattcgtattttcccattacctgtcgatgaacatgggattaacccagatgatgtacaggagttatatagaaaacaccgtattaaaatgatctttttaaatccaaatttccaaaaccctacgggaacgatgcttcatccaaaccgtagaaaaaaactattatcactttgcgcagatttacgaattgcaatcgttgaagatgatccgtccagtttacttacgctagaaaagaaacaaccttgccctactttaaaatcgattgatgaaaatggaacagtcatttatgtacattctttatcaaaaatgattgcgccaggattacgagtcggctggctcgtcgctccgcaatccgtagtagaaaggttatccgacgcaaggcaccaaatggaattaggtatgagcatattcccgcagtggcttatgcagcagtttttcgaaactgtaccatttcagtcgcatatcgtaccgttacgaaaacaactagcagaaaaaagagacgttatcgttcgcgccctaaacgagcaacttcacgataaaatctctttttcaaacccaaccggcggtatatacatatgggggaaactaaaagaaccgataaacgaaaaacaacttattatgcaaagtttaaaacaagaaatcgcgtttatgccgggtagtattttcggtgcgaaagatggttatattcgtttatcttatggaaaagtgaatattgatcaaattgaggaaggtatttctcgtttgcgtgaggctattttagtttgtgaaaaataactttacataaagctctatcgtttgacaaaagaaaaatctaccattattatcaacacgaacctagttaccccgcattaacgggcaataaaactcccagctcaaaattcagctgtaacaaagaagttaggtgggagattaactgcccgtaaatgcccgattggttcaactaataatcagtggagggtgaatccccccactgattaaagtttcactttataggagtggtaaaaatgaaaatttacgttgatgcagatgcttgtcctgtaaaagatgtaattatttttgaagctacgagtgcagaaattcctgtaactctagttactagcttttctcattattctaatgctcagcagcctaaaggtgtagaaacaatttatgttgattccggagcagatgctgcagattaccgaattatgcagttagcaaaaaaagaagatttaatcgtaacacaagattacggtcttgcttcgctcgctttagcaaaaggctgtatcgttctacaccataaaggctataagtatacgaatgataacatcgaacaattgttacaaacacgatatttaagtgcaatggttcgaaaaagtggtaaacgtacaaagggaccgaaaccatttacagcagaagataaagagaaatttagagagctctttaaaagtatgatcgcactttaaaaatgaatcgtctatttgcaaggaaaacttcgcaaaacaaagaagagaatatcgtaatgaacattctcttcttgaggtttaccctttaaaatgaaggtaaattatctaagttattttcttttattccatcaggttcactacgtataatatctctaccatacttatgaaatacgtccacatgagctaacttccctgattttgcttcactaagagcagtcatataatctaactctctcccgctacttgttttaaaagcaatcaaatcaccttcatcatttttacgaacagcaacaatttgttctgctcctgaagtaacttcctgagctatttcaaattgagcttgctcttccccttgatgtaaataatcattatatactttttcaaagtcttttttgtccattaaactcacctccaaaacattttattagtatggttgggaggtgttggttttatgtacttttctgttagaaaaacgaatttttaatacctacgcaaacccttcaaagtctccaatatatcatctgtaaaggctgtactaccctctgtctctaaagctctgaaataaaaacttcttaggaaagttctaatattttgtactaaaatagcatgctgcggatgtcggatgtcttcaacagttgctatactatgtaaccagttgctccactcttcttcagttaaaagattttggtcacgtaaagacataattggctttactaatctctcatcttcaaagtgtacatatacgtaatcacttaatcgaaccttttgacgaacagctgcaagaattgcatatgaaaactcacgattttgtatagtacgcactaaagcatctagtgcatcagcagcgtgtgcagtagagtgtgcccagccttttccttctacgtaacctcttacatcttcttctaaatatacatattccagcacttgttctgctacactgtacagttgttcttcggataacaacggttctctttcatgaacagataaaataagtggtggaattaatccggagaatgcacgtttaaatacagagtctgttcccttttcaccaattttataaaataaataatcaggactaattgcttgtaacattaatcctcttaactctttttgtctaaatacatcatttgtaatccatgtgtgaagcgtactataaattaaatcatcacgtaattcagcatcaggtgatccgatataatctagcatccactgcgcatatggatatgcatctacgtcttctggtacagcataattgttatttttaatttgtagtagttcttcttttagttctagtacttcattcattatatttcttgtcccctttttgcgttttttattgtcttatccccttttatttgcttcataaaattaatttaattataacaataaacaaaaggctatacatatatttctgattatgtattacgctctttcatgaaatataacttctggatttcctaaatcactattcttaaatataacattcgcacactctttcggattatgctcatctatatacattttacaagccgcgtgatacctgtttaaaaacatcttctctgcttcttcataacttccaaaagcttcagtttcccgcttagcaccacgttttctcgcaatctcaaaatttgtatctacaaagattttgtaatcaaataaatgcgcaacgtcttttttcaatagaaacgttccatctactattaatatcatattttgcgtggccaatagcggctcattatgtacaggcatatccgttattaagttatgagaaatcgtttcatactgtaaatttccgttaggtcctaaaggcattaataatctttctttgaaagctgtataatcgtgtgcatcttcataataccctcttgcagattcttttccttttgcatagcgaatcactcttggattatgaaaatcatcaatgctggcgcgtgttactggtaatcctcgtttttttatttcttccgctagttcgcttgcaaatgttgtttttcctgaggctgtaataccgcttactccaactcttattggatgggttaagtttagctttacaatatgatctgcaatttctttgattcgttgttttcggttcatgatatctccctttataattagtttacataatataattataggtaataattcatgtcactatttgtcggtaaatcgatatcctttctcgaatcgctgatatctcgaaaaaatcgttgatatattttaagttatgatagatatatttgaaaaatcgttgatatattattagcttacttccccttaaaccctcgatataaagcagtccgtaattcttgtttgtattcttcaatttctggcatttcgagttcttctgctagtctgatagctaattcaatatcatacggtactcgtacaagttgaatagaaaagctcgctgcttctttttcattgtaagttccttcaaatattaaataggaagcttgtgttatttcaagtgggtttcctacgctaccggcattacataacgttttccctctgaaattttgaacgaatgcttggtgaacgtcaccgtaacaaacgacatctggttttctttccccttctatattttccgtcagatcactattttcgaacatactaatacgttcttctcttgaagcgtgtggttgaattctttcatataaacttctcggtgaagcgtgaaacatacgaatgaatttcccactcatataaaactcgattgaaaatggtaagtttcttaaatagtcattttgttcttccgataattgtttttgatgccatttcaatgcttcaaattcagtcggctttgtaataaaatcatcccagtttcccattacgactacttcacattctttacgaatgatttcaattgcttcactggaatgaggtccttttcctactaaatctccaaggcaaataatgcgctcgattcctcttaatttaatatcattcaacacggattctaatgcttgaatattaccgtgaatatctgaaattactgctattttatccatataaattactcctttatttattaaattcgcttgattgataccattttggaatataagatgaaaaatgattatgatcttctaaaattccatttaatctttccttcatatcatctactaaatgcggtgtacttcgattcgtccaaacgatatccgctgggaatgtcatcgcgacgtacaatgtatacagtttccaaaaatgaagcgatggttcgcctccgaaataaccgtgaacttgtccaaccgcaaatggtttacttattcttatagtaaaaatcgctacgttataaaaatcgtgtattggatcaccaaaatcatatccaccaaaatcgataacgataaattccttattatgaatcatgctatttgctggatggaagtcatcatgtaaaaatcttattggacgatttcccaataaatctttatgattttctacaaaggttaatactggcttcaaatccagaaaattcacctcgtaatctgttagtgcctctatgtatctttcgtatttattccatctagatgtttcccatttattacttgcactttctctttcaattgggtgaatcctctttaatacttcccccgcttttcttcctgccttatactgttcttccaccgataacttcgttaaaccttcttcaccatttatacctcgggtccattcaaatacttgaacacatttatttaatttctcaattattatgaaatgaattaacttgggtgttggaatatgtaatgactctaattgtttcatatacgtatattcttcttgtttacgttcaaaatgaacagcatcacatacttttacaaaataggtttcttgattctttaattcaattttatatttctcatcgaatgaaaagccttttgaaataacagtcgcttttaacatgcgaggccattctagtattctctctatctctctaagcatttcttccacaacgttcacctctattaatatatgtacaaactccctaacacttcatgctctcgtttatttccccctttaaactctactgcaaatggatattcgccatgattctttatgtattcttgcactagaccttctccaaccggttcacaaaactgtacttgaatgtcaccaaacgatacactttgacactcagcattccatttttcatttttcacaactgagcttgtagatagtcccattacttctttccatttccgtactgtttctcgaacattttttactgcgtaatgaatcgtttcaatttgttgcactttgtttttatgttcagtaatcgtcccactgttacgtaaatcgtttcttctttcttcgtccgtttcattccactgtataaagaaaggtaatttcggtccgttctcttcttgcttaacgaataacattttccattctaaaagtcggccatcttttctcatacgtttcccttcaaatggccctatcgtatgtaagccgtacttattaaagttaactgctagctcctcaattgcatctgttcggatcgcgatttgtagcattccttctccattttgtagtttcaccactgtttcttgtactaatggattttctgcttctttcgctttttcttcatgttgaactgctaaaaattctatatatgataaatcaaaataacttaaactattccaagtaccccaattcgtatgctctccgcctaatacagtatgaaatcccagttcctgcatttgttttgccgcttcctccggtgtaccatgaactgtgtgaacgagatgatcaaatcgtaacatgtctttctcccctttctctccatccttttattgtatattttatttttctttcattcaattcaaaaactttaaaacccagttgatttatacgattaatatgtattataatgaaacaaatttaattattgctgattggaaaaaccaaaggcacttttctcatacgggaaaagtgtctttttcatttattattacagggggattatttatgcagaaattaattgtctttgctattattggatttttcgcccaattgatcgatggagcactcggaatggcgtatggggtaacgtctacttcactattattaatgtttggtattgcaccggctgtagcttcagcatcggttcatttagctgaagtcgttacaactgcagcttctggcgcatctcatatcaaatttggaaacgttgataaatatacagtttccaggcttacattacctggggcaatcggcgcatttgttggggcatgttttttaagtaatttgcctggagatataatcaaaccgtacatttccgtatttttatttactttaggggtttatattttattacgattcatcattcaaaaacaaattgtcacttcaaataagcgtatgtctgccaaacaacttgtgccgcttggtttattcgctggattcgttgattcaactggtggcggtggttgggggccgattacgacacccgttcttctagcaagaggaaatgaagctagaaaagttattggatctgtagatacgagtgaatttcctgtttcactcgctgcaacaattggcttcttcatctcacttggctgggaacaagtaagctgggtttgggtatttgccttaatgctcggcggtattgtcgcagctccaattgctgcatggttagtccgcatcgttccgccccatttacttggcatattagttggtggtcttattatcttcacaaatattcgtacactgctttctacatttaaagtggatccaactattatttcactttcttacgttgcagttggtcttgtcgttattatttctattttcattgctgttcgaaatcattccaatcgtcctaacgcatcaacggctgagtatccgaatgatcagaagcaaatgctaccataactataaaaaataccgctcaatttagagcggtattttttatttttctattttccaattaatcatcgtttctgtagcatttactctcttcatatgtaacttttctaaaacacgcatcgaactatagttatctaggagtgtctccgcaattattgtttctacctctcctgttttgaaagcccaatcgattagttctcttacagcttctgttgcatagccctgattccaatatttctcaataaatccatagcctatttctactgtttgattctcgtttggtttccctttaaacccaatatcacctaaaacgctatcatcttctttccgaagaacataccacgccccccatggtaataaagccgcatcttgttttacattctctacatgccctacaatatgcggaccgctattatatccttgctcgttagcgacttgaatactctcttctgtacacggcactatatagagcctttctgtttctaatttcattttgatttcccctttttgcttaaacgttactctgattataacaaataatatgactttatcatgaatgtcgaattatatttttctgaattttctttttatttagagggtttttcaatattttttgcgaaacatttgtataacaattttttctttgcttattgctacataatagtaggttcgggtggagttttgcaagcgtttcctatacaataaccgatattttttgacttttcctaacaaaatatcttgcaatatattcagaaagtcattacaattgccatatattaaaaatcttagcaatatataaatcctcatcaatccgatgaggtagaggttgcgacttttaatagtaaaacggacgagacacagagaatgtcaccgactccgtttgaaaggaaaagttgccgaagtttatatttcttctctggaaatatgagctggggctgtctccgaaaggaacagaactgtcacgtttacaaaattaccgtgtaaacgtggggtgctatcttaacggaagggtatgatggggtggttatttgtgaaacgttccgccaaattcctttggcggttttttgtatttttctcccccgctccttcctaacctacaagaaaaggagtgttgaacatgaatagcgcaacaaatcaatctacctctaaaacgcaaactacacaaggacaaggtgaattaaaacgcggattaaaatcgcgtcaccttacgatgatttctctcggcggtacaattggtaccggactatttcttgccagcggtggtgtcatccattcagctggtcctggcggcgcattaattgcatacgccgcaattggaattatggtttacttcttaatgacaagcttagctgaactcgcagcttacatgcctgttactggatcttttagtacgtatgcaacaaaatttgttgatccatcacttggctttgcacttggatggaactattggtataactgggcgattacgatcgctgctgaacttgcagccgtaacattaattatgaaattttggttcccagataccccttctcttatttggagcggattatgtttagctattattttccttttaaactatttatctgttaaaggatttggtgaatctgaatattggttcgcacttattaaagtagttacaattattatctttttaattgtcggctttatgatgattttcggaattatggggggcgaaactgttggattcaaaaacttcactgttgcagatgcaccatttaacggcggtatcatggcaattatcggtgtatttatggcagctggtttctccttccaaggaactgaattattaggagtagctgctggtgaaacatctgatccagaacgtaatatcccaaaagcaattcgttcaatcttttggcgtattcttttattctatatccttgcgattctcgttatcggtttattaattccttatacaactgaaagtcttgctgcaagtgatgtaacagtaagtccatttacacttattttcgaaaaagcgggcgttgcctttgctgcctctgttatgaacgctgttattttaacggcagtactatctgctggtaactctggtatgtacgcatcaactcgtatgctttgggatttagctcgccaaggaaaagcaccaaaattcttaggcaaattagatagccgcggtgtacctgtaaacgcattaatcgtaacgtcaattgtcggtagtatcgctttcattgcttctttattcggtgacggtgttgtatacatttggttattaaacgcatctggaatgtctggctttatcgcatgggttggaatagcaattagtcattaccgtttccgtaaagcatataccgtacaaggcaaagatttaaaagacttaccatatagagcaaaatggttcccattcggtccaatcttcgcatttacactttgtatcatcgtaattttaggacaaaactacggcgcatttatgggtgaatcaatcgattggaacggcgtactcgtttcttacatcggtttaccactcttcttagtactatggttaggatataaatttacgaaaaaaacaaaagtgattccacttgataaatgtgaactaaaataaagtgaaacgagcaaacaaatttgtttgctcgttttttgttgcaaacctctttgcttccctattgctcctgtttttgccataatagaagaaatataattaaaggttgggatacaatgaacattcgcattactgatgaagcaaaagcagctatacatagattagaacgtaaagacaaaaagatcattcgcattagagggacaatgacaaactcttgtagtattttcgttgatgtcgatttaatttgggatacatataacgcagatgatgttgtatatgaagatgcagatcttatcgtacaaatggattcattcacgaaagactacactggtgatacggtgaaacttgattataagacgacaggttttagtattacgactccgagtgagactttagtttatggattgtcgattaaaaaataaaaattgttttcatttgaccactgaggtgaaaaaatgggtaaatatgttccgttaaaatttttatttaacgaagaattagcagaaaaaatggctgattctatttgtaaacacgatcctactttctctaaaagaaactttgtatcttccgtaacatgtaaagttgaaaatttagagttaaagcatcgtattgaagtaattgcagatgaattacacaatgctttacaaaaagattttaatgcagccatacatatattgctgaaaacattaggaccagaaaatacaacagaagtaggcacatttacatgtatgaaataacgaaaaggaatactgctgaatatgccattcggccttttcttcaaacataccatgaagacacactagacatattgcaacagtggattcatgacgaaaacagccacattagaagattagtttctgaaggtacaagaccaaggcttccttgggctaaaaaaattggagctctaaaaggtgactttaagaacaatttacagcttcttgaacctttaatgaatgacccttctaaatatgttcaaaaatctgtagccaatcatatgaacgatattacgaaagaagataaagaactcgtttttcagtggttacagcaattacgtgataaacagcatcctattaaaccttggattataaaacatgggttaagaacaataataaaaagtggtactttaccaaaagatttttgtttttgagtattttaaacaaaaccgcttatgcttcaaaaatgaaacataagcggttttccttttgaatacagaaataacaaacataaaaagcactttaaatttcttctttatatcattattttactaactcttctatgttattactttccttaattttttcggatgatagccagagtgaataacttgttccatccttgttccttaaatatatgttaaaatccttattatatagttcttctttaagaatagtgactacctttctcaaatcatctattacatatggatcatttctatattttatctcactgtcattgaaaactaatgtcaattcatactctagacaattgccgtctttcgggtgtggacaagtaatatcctcaatttcaaaacgatcattttgaatttcatttaaccttacgcctacttttgtttcagtttgaaccaaatatgtccaataactgcttactgtgtttttcattgttaaaagcagttcttctttcgttatagctttttgcacattttgaaaaggcaagcctatagattcaccattataatcctcaatttcaagtgttgttatctttctattactcttctgaatgaattggattagagcatataaacgatctaattcttttgattcaaattgactgtaatcaatcttgtcactcgtttttaaagttaataataacttatccgttggtttctcctctatatcatcatccactatatattgaaaaacatttttattttcaggttccacgtaacctaattttttaatttcttctagcattggtttaaatttcttatattcctcatatgttttttttccgtattgatattcatcaccttttattcttgaatataagaagccatctacctctactctaaattgaatatttttgttattttttgcttgaacagtatgatatgtatgccccatatttccttcgtttatagcaccccaatgtgttacaatcacatcaattccgtgcttttttttcacatattttttcacctgatcgtcatctttataattacacccacttaaacataagaaacataacaatagtaacattacatttttcattcttttcatatagcaccttgccctcttttcgcataaacaaaatattccatatataaagaatactaaatcgctgaatgttttcaaagaattaaaatatttttacactcggtatatatatctatttcttttattaatggctctaataagttttaatattgataatcgaatataataaaaagaaacctaaatttaaggtttcccatttttaccaacaatttaaattttaatagatattttttagccaagtaataattcgtagtacctgaaacgactcaaaccaagtaatgaaaaacaggacaacaaagaaagagataagtgatatgaattttaatcttccatcttcacgtctagcaatcgctataatactcagaaccactccaattaaaaaagaaatataccctaataggataataggctcagaatagctatctattatcctatttaatccaaataataacattccaaaagtcatcaaggttattgaaaatacactaaattttttcataattcaacctccaatataattttactattttatggagagaataatttttttatgcgtatgaatgaacaattacactataaaagtagataactcaatttactttttcattaaacaactgccttcttttataccctcaaaggattttcactcaattaacccgaatatataaataacaattctcacaaggagtaactttatatgaatctattcgaacacgaaacataaaaccgttccactttaataagaggtcctccctttttcttttctcatcatatcatccattaaaaaaataggaggacataattatgaaacgtgatccattatttttaactttattagaaagtgcaaatacacattttagcggttgggatttttctttcatttcagaaacgggtcgaatgaagagcgagcctttatcgtggtcgtacggcagtactgcttttcagcttatgcaacgtgcagaatcaatgctcgatatgggtactggcggcggagagtttttatctatgttacaaccgttcccgtcaactatattcgctactgagggctacgctccaaatgtgccaattgctcgaaagaaattagagcctttaggggttgccgttgtagaagtgaccgatgatactgctttgccatttcaagatggtcaatttaatttaattataaatcaacatgaatcgtatgctgcttctgaggtaaacagaattctttctccaagtggcgtttttcttacacaacaagttggcggtcttgattgcgcggaacttaatgagcagtttggctcaccactaaatagcgaatttgcaagttggtctctcgaaaccgcatgcagtgagttaaagcaaaatggatttactatcttagatgcaaaagaggaattccctttccaacgcttttatgacattggcgctatcgtctattatttaaaagcgattccgtggcaaattcctgattttactgttgaaaggtattgtgaggaattatatcgtatacatgaaatcatcttacaaaaaggttattttgatgtgaagcaacatcgttttatgattaaggcgatttgtagctaacaaaaagaggtggcaaagccacctcctttttgctccgtttacatatgttctctactctttcataataagaaaagttatatcatgcatattacaattatgaccaatgaattgtatttctgaaacatataatcacctcgcatatatgatgagagcaaaaacgtgatttttcactttcctcttctattgagaaatgagttgtttttcatatcgcttgttcgcatcatcttctgtcaaacatgcagttgtgtaatgaataatattccggttatcatacgtaaacatatgttctaacttattttcttctgttaatactgtcggtaagtattttggtaaattgctaactactcctctattatcaccatctaatatccaatcaatttctttccattctaatagaccttcagccgtacgtaatggtgtattcatttgcattccatctggcaaatcagcaacgaacacatacattccttcactagcctggggctcatctttacctttaaaaccaacagtccctttatacgttacacttgaaagttctatgcccgtttcctcaaatgtttctctaattattccttcgtatggcgtttcattatcttctatttttcctccaacaccattccacatccccatattcggctttttatttctatttaatagcagtattttatcgctttttctaataaagcaaattgtgtatttgtacatacgatcatttcctttcattttccacatgagttatttggcttattttcaagtatcgacgagtctaaacataaatttttcatatcatttaatccaaaaggttttttaaagaaaataaagtgaaactttaataagtggggttttgctcctctcccacttattctattattttcatttttgaaaaaggataatatacaaattccaccttgccaattatgttatcttcttcaatatatcctaagccatttcgactatctctacttacttcgcggttatctcccattacaaataacttatttggcggaatttttgtcttttgaaagttataaaacacttgtgtgttgttaaataaatctttgtttgtatatggttcttcttgctttttatcgttcacatatacctttccgttcgttatgttaattacatcaccaggaagccctattacacgtttcacataatatttcgattcatccgcttcctttataatgacaatttctccgtgttgtaaattagaaagacgtactactgctttatttacaaatacgtagtcttcttcatataaagtcggctgcatcgattccccttccaccttacataaagtaaaagaatggtagcctatgactatcaccaatataaatagtatgtactttccccagcctctcttaatctcctttttcatatccattcccaccttataaagcgctttttaactcaaaaaatatatcactgcacaatatgtttccatgcagtgatactatttttactgtgccttgttcggttgttctactggaattgaatttgtatttgatctatttgtttttaattcaaaatacgcatccaaaatctctttaccaatcgcagaattaattcctgatttatcatcattcacccatggtacaacaactgaaaaagctacttccggatcagcatcatatggtgcataaccggcaagagttaaattataacatttttttcggttgttgttctcatctcttccaatatcactttctccaccatatactgtctcagctgttcctgtttttcccgctggtttatatggtagacctttaaacgttccggtacctgttccgtcagcttcttgaaaaactcttctaaatccttcttttacatgattaatgtacgaagtgtccatatccactctatttaatacaactggttcaatcgaccgaacgacttttcctacatcctctggtctattcggttgctctctaacttcttgtacaatttgtggcttcattcggtaaccgccatttgcaatggttgaaatatattgtgcaagctgaagcggcgtatatgtatcatactgtccaatcgcgtaatcaagtaaaaatccgggtatgttatcagttctacctacttgaccaattgattcatttggcaggtcaataccagtcgacacacctaggccaaattgtctaaaatagtagcgcattttattaaatgtttcttgtttaatatctaatggattgtttgggacataattaatgcctgccatttttaaagccgtattaaacatataaacgttcgatgacacttgcaaagctcttaaatcatcaatatccccaaattctttccacgatttcttcggcttagaacttcctttaaaatacattggtgcatcaaagaaatgtgtatacggcttaatcgcttctgtttgatatccagttaataaagtagcaccttttacagttgaccctaactcataagaacttgtcatcgttcctaatgcataatcttctatttgcataccgccatctttatttacaattttctttcctgccattgataaaatttgaccgtttttcggattcatcattactacgaacgcacgatccatcatcggctctgcagcatgaaaggctcgtaaattcttttcaagacttccctctactcttttctgtaaatccatatcgactgttaacatcaagttatttccactttttccttcagtcactttttctgtgcgaacaatcttccctgctttatccataatatttttagactgttctttcgttccgtgtagtgcatcttcgtattgtttttcgatgtaacttttaccaatacggtcgtttcgattataatcacgaactaaataataatctaattgttctcttggcaacccttcattttcattagaaacgctacctagtatagagcgcagtattttatcatttgggtattcacgttcccaatctactgttgtatctacccccggtaaacttgccaacctttcactaacgacagcatattcattttgacttacatcttttttaacgatttgcggcgtcattttatatcccgcattcattttgcttttaatggctagtacttctaggtcttcttttgaaagttcacttaattcttcttgtgtaattctttccctacgtaactcttcaacttttttatctaattctttcccttctatctcctgctttctaaatttactctcatcttctttcgttactttcgctgctgcccgcttttcatttaactgcatccaaaaatcctttttatctgtttctgttaacttgtctatgtcctcttgcgacatttcaattagcttagctaaacctcttgctacttgtaaaacttctttcgagtctactcctctcattttcgtatatgtaacggttcgcaatggtttattatttacaataacgtgaccttgccgatcaaacattttccctctaggaacgggagtgcttaccgttacatcttcctttttatttacttcatttctatacgtttctccatcaatgatttgtactttacctaattgaattataatagctgaaaataaaagaaagacaataaaaaatagtacatttaaccgaaatggaatatgagtctttttctttttcgatagttttttctgctcctttttctgtctcatttcgctccctcgcttcattctattaacatttctacgcaaagtcattatgtatcaaatttatttatatgatatatatagaattttatattaattataaaagaaataaaagatttaattttcagttttttatttttataccctatttattaccattcccttaatgcacaataaaatgaatattattctaaaagaaaaatggagcaaatttatttttataccattagtttacatttctttgtatactaaagaaataaattcataaaagacattacttaaggagagaacgaaaatgacagattcgtttatcatacatactaaaacgccacattgtttaaactttatgatctacattcaaaatatttatctcaatcaaaaaggaaaaaaagaaaattttcgttttccttacataacaaaaacattacatttctccactgactttaaaataaatttcaaagaattatggctgactcttcgtaagcaaactgctaacgacagatatgatttacaaatttttcatgaagaaaaccatatcttctatgagaagctttttaacacccaattatgtaatgaagactcttttaaagaattagtatgtagttttcaagtatggtggactagcatagtaggtcaactttcattagaacgttctgtagatgaatatgggcaacaactttttaacgatttagttttatacttaaagcaaaacgaaatagaacctttacaacagctacatattagcttactttatgacgattgtttattggttaaagaaaacatttcttcctattctgctattttgccgactaaaaccttttttataaattatagagatgtgattactacattatcgacctgttttcatgttgcttaatacagcgattacccaaataaaaaactgaggtagatacctcagttttttcgttaacttatttcattgaagataacccttcaacaaactcaccaatcttattttgaaaaacaaagtcaaagttatattcttgtcctgttaactcttcatttactaaaatagttgttgcccctacttctctctttgcgatttccgggaatgaagcgacaggttgtacttttaatgacgttcccataacgagaagtacatctgtttcatataaacgtttcatcgcattttgatattgaggcagtgtatctccgtataaaacaacgtctggatttaaaatgaaattacacttctcacagcgcggcacttcatgatcaatcatatactgtaaatcatatcccgctttacacttcggacaatgtgctgtttgaagtgttccatgtaaatcaatgacatgtttactgccacctaattgatgtaaaccgtcaatattttgcgttaaaatcgtaatatctttcccttgttcttctagctcagctaaaaaacgatgtccacgatttggtttatattgatggaacgtattaatttgaaagatttctttataatgcttccaaaattctttcggacttcggttatagtaccctcttgataaatacatctccacattcgcatcagcatacaatccatttgctgaacggaaatctgggataccactttccgtacttgcaccagcgcctgttaatactgtaattttcttcgctttttctaaaattaaacgtacttcttcaaattgttgcacaaaaatcacctctatgtattttcctattcttattataccagttgtttacaggaggtgttgtacaattcattttacttaatgcgttgcgcccccaatctctacaatatctacttcaactgtcatcgttacttcaattgccaattctattcccttactaatagtagaaagtgacatactcggttgccctggataattactcgcttgttctggtaaaaacggaatatgaatgaatccgccttttattttcttatcatgtttctctaattcatgcataagtccatagaataagtgattacaaacgaatgtgcctgccgtctgtgaaacagatgacggtatgccctcttcgcgaagtttttttacgattgctttcatcggaagtgtagaccaatacgcaatcgctccttcttctacaaccggtacatctactggctgattcccttcattatcagcaattcttgcatcatcaatattaattgcgacacgttctatcgtaatatctggtctgcccccagcttgtccgatacatatagtaatttccggccctagttcttctatatactcttttaatacgcttattgatttatgaaatacagttggtatttgtttgcttattatcttgtattctccaattgttttttcatgcaaaccttttgctacttcccaagctggattgatattttctccgccaaacggatcaaaccctgttaataatactgttttcatagttttatcctcctaattaaaaacgatatacaaggccgtacataataaacatatttatgataaaaattgaaagagcaattggtacttgcgctttaataaccgcatttttatcctttagctctaaaagcatcgcaggtacgatattaaagtttgctgccattggcgtaagcagtgttccgcaatatccagcaaacataccgagtgctgccataattgctgggtttccgccgtgcatttgaactattaaaggtaagccaattccgccagtaataacagcaaacgctgcgaatgcatttcccattacgactgtaaatagcatcatgcctaaacagtacgccataacagcaacgaacggatactctgtcggtaacacttgtccgactaaatcagaaacgacttgtccaacgcccgacttcgcgaaaataccgccaagtgccgctaacatttgtggtaaaataacagcccagccgacagcttgtaatagtctgcttccttcttgaacaggcgttgttattttcgattttgtaatacgcatcgccgcgacaaatgcgagtaatgcaccaagcgctaatgcaactaaagttactttatctggatcaacaagagagacatttccccatttaattttccctaacgtcaacgtaccgataattgtaaaaataggaattaatagtgcaggcataaaaattttattttttaatttctcagcatgttttacacgttcttgtactggaacttctttttcctctgattttgtcactttatttagcgaggctaaaacgaccatagcgagcacgatacagccaacgtaaaacgaaggaattacatttccaaataaaaatgtaactgcaaacaatgcccaaaataaactagaaccgaatctgtttggatgttcacgatcgaatgcgatacgaacagcgataaaagcaacaattatccctaatacataatagattgtatccattgtgatgatgttcatattagattgcctccttctcttcttttccttctgccttcattgttttctctatatatttatcaaaccttctaaatctaatccagcttacaataagtgcagatattgctgtcggaatgccccaaagtgccatatcccatacaccgacatgcatacctactgaatcgaagaatcctttcattaataaaatagcaccagttgcgatgaaaatatcttctccgaaaaaccaagctgtattttccgcagcagctgcgtttgctttaatcttttctcttaatttttcaggaagtttaccgtatttaccttgcgcagccccttctgccatcggtgcaacgagcggccttactgtttgcgcatgcccaccaatattaagccctagtgctgctgatgattctcttatcgtaaaatatgacattaatactcttccagttgttgctccttttgatttcgttataagtgcttcggctctttcttttaaaccgtaacgctctaaaattccgattaccggtaaagttaatataattggcatagacatatatctattttctatgaaaaatttaccgaacatgctgatcacatcataaaaacttaatcctgaaaccataccagtaacaatacctgcaaccataactactaaaagtgtatttaatctaaataaaaagcccactgccactaataatatcccgattaatttcaccaattccaacacttcccctcattttttatttcggtgcacatatagaaataccatcatgtccgaatgttctgtatattctttctgcaaattgcactgctttttccccatcaccgtgtaaacaaatcgtttgcgcctgaactgctactttctctccattgatcgaatttacatggccttctttcaccatttgaagtacttgctttatcgcttcgtcttcatcttttataagcgcattttcttctgtacggctcgttaatgtaccatcttgcttatacgtacgatccgcaaaagcctcttgtacgagagttacattgtatttttctgcagcctgtataaacgcctcgctatttgctaatccgtaaagtaatagacttggatttatatgataaattgcctttgcgattgcatctgcaatttccggattagacgccgccatattatataaggcaccgtgcggctttacatgatgcatcttcccgccagccacttttacaaacccgtctaatgcgccgatttgatataaaacataatcgtatacttcacttgctgaaacattcatgtttcttctaccaaatccaattaaatcaggaaatccaggatgcgcccctattgctacgttatactccaaagctttttcaacagtttgacgcataatagacggatcacccgcatgaaaaccgcaagcaacgtttatagaggaaacgaacggaagaatttcatcatcattccccattttataaactccaaaactttctcctaaatcacagtttaaatcgattgtagtcacaatgtattcctcctaattccagcttcgtaaagcgatgaatttctttaatagattcatatttacttcttgttctatgtacaattgttccgcttcttcaagcgtaattttctcaaaagaaacatagtcccccggctttagctgggcaagaagaggtaaatctactgaaatgatatctcccattctcggatagccacctgtcgtttgcctatctgccattaatataatcggctgtccgccattaggaacttgaatggttccaaatgtaacaggactcgataaaatctctttttcttgaatcctatttaaaacttctccctcaaccctatagcccatacggtcagcataattagataccttatactctttcgtaaaaaatgcctttctactttcttctgtaaattgatcgtattcaaagtcagctatgacacgaagcttaggatgtttcttatactttggtagtacgctgttgctaattacccatttcgtttttattcgctcatctttttgtaagtcttgaatgaaacgattcgccatttctgagtacgtaccaatttgaaaacaatctccttttttcagcattcttccttctataccaccaatcgcagcacgtatgtacgtacttttgcttcccattgtacgctcaatatgtataccacccgcaaaagtcacatacgctctacaaccacttttcacttttccaaaacaaagcatactaccttcttccgctaaaatgggacgccataatgggatacgttctccatttaacaacggttccatgtctgctccgccaatcgcaagtaaagtcgttttctttattaacaatttaggtcccataatcgtcatttcgagtcccgcttcattctcttcattaccaactaacatattgatcatccgaagtgcactttgatccatcgccccgccaactggcacaccgtattgttgataatgagatcgccctaaatcttggactgttgtaaacattcccgcatgcaaaacttctacatccattctttaaccccctcaagtgatacgtactcttccttcgttattggaataaatcgtaaatacataccactttgaatatatgttggtatttcttcttccggattaaataatgaaataggagttcggccgataatattccatcctcccggtgtttcaagcggatatatacctgtttgatttcccccaatacctactgaaccaggagagatttgtaaccgtggtgtttcttttctaggtgttcctaattcttttgataatcctcctaaatacgggaaccctggtgtaaaaccaagcatatatacaaaatatgtagtttcactatgtattcgaatcacatcttctacttgtaaaccgtgataatgcgcgacctcttctaaatcaggtccatattcttccccgtagcacactggtatagaaatatgtttcacatcctgttttacttcttctttataagaatcacacagttcctttatatactggcgaacgtaatcatatgacctttcacttctctcatttctcttccatacttcgtatacattgtagtaaacagctaatgaagtaaacgatggaacacactcaatcattcctgcaaacggatgttgctgcagtgcttgaaataaccgctgtactttctcatatatatccatcttaatttcttcaccaaatgtaacaataattgcttgatcccctaacgcagaaaatttcatcctactccctctttctatgccaaaaagccgagttctttcgaaatgcgatgcgctgtttctttcaccttcgcaataaaatatgaaatgttactttcgctgtactcaattgctaatcctgaaatactaatgcctgctacaaccgttccatcgctcgcgaaaatgggtgctgctatcgcggctgtatgattttctaactcagaataactaattgtgtagccttccttttttgccatttgcaacacttctaacaattgttccttatccacgattgttccatctgcaaactgttttaaatccacttcctctatgtatctccgtttctcttcctcagagaaatacgatagtaaaattcttggacatgcaccagcataaagcggtgctcttcttccaactgccgtatacacgcgtactggctgaacaccttccatcttttcaacataaattgcgtcattaccatcttgaattattaaattaactgcctgtcctaaactatctctaagttctttcatataaggaattgctatatttcttactgataatcggtgtgaaacaagttgaccgaaccgtaaaaatacgacccctaaacgatatttccccttttcgtttttttgtaaaaacgccatctcttctaacgagccaattaaacgataaacagatgttttcggcatatttgtaagctgaaccatctcagttaaacttagctcttcatgctcataaaacaactctaaaatatccattgtcttaactgccgttttatttatactcattctatctccctttcgttccgaaaaacggaacttaaattccgtttttcgaaacaaacatataatttaaaattataaaatattctttcaattcaatcaatagattttaagcaaataaaaaagcatggaagaatatctctcccatacttcactacactttataacgctcttacttgtttcaacggccagaaaacagcttgtccttttccaacaatttcatcttctgaaataaagccaaacatgcgaccatccttagaaacttcacgattatcccctaaaacaaatacttggccttctggcactttcgttttccctgtgatttgttctaacgtaaagtctggagttaatacacggcctactgctttttctttaaactgttttaaatatggttcttccatcgcttttccgtttacatataaaacatcatttttatactcaactgtatcgcctggcaaaccaattactcgttttactaaatcgtaaccttcttttccgtggaagacgataatatcaaagcgatctaatccacttatactataaccaatcttattcacgagaactcgttcgttattttctaaagtgggcatcatcgattcaccttgtactaaagaaggtgtaaataaaacaccgcgaataatagcaattaatacaagggtaaaccctatcgttttagcccatgagaataattctttcttcgtattttccttcatcgtttctcctctttcttaagcacttattttattatttcaactaattcttgtactaaattaggatctatttcagaaaaacatgattttccttctcttaccgctgtaccgacgtgcgcctgcgtaattccagtttcatctagcaatcgctttatattttctttcgtcacgccagctccagctacaagctgaatttgaccatcgcttaccttttgcatttctgtaagcaccggaatattctctactatatttccttgtccacctgaagttaaaacgtgagtcactttatgaaacttctttaaagttctcatcgcttctactggattttctatatcatctatcgcacggtggtacgttacatttattccatctacaacagatagtaagtccgctaatttctcttcatccacttcatttcgttcatttaatacgcctaatactacaccagctgctcctaacttctgtgcaactataatatcttctttcatcatttcaatttcttcttccgtatatgtaaaagacttcgcatgcggacgaatcataacatgaattggtatacttaccgcttctaccgctttttttataaaagcataactcggtgttaaaccaccttctgtataagatgaaattaattcaatccgcttcccgccagcgctttcaattcgttttacatcttctaaacatgttgcaataacctctagcatgagatgacctcttttcgtgcttttttcttattataacattagtaaaaataagaagcctagctttctcctttaaaacttaaaaaagaagaatgaaaagaaagatttttttattggcaacaattattggtaacatcctattattcatgtacactcctaccataatgaaaaaacccgtcattttgacggacttttctaatttcaagctttcctttcctcagttttcatatcaatgcctaattgatcttccaataactttacacctttctttgtaagatggacagcccgattcttatccgtttttgtaatccattcctgttcaaaaaatagttttgctattgcagatcctaaccaaccggcaatatggtagcgtcgttcactccaatcaaggcaaggttttgcaaataccctcctttttgtatctgcctcatcaacatttatttcaaaattcagaaaccattgcttaccttgttccgttacaatgtattctccatcctctaaaattataaattgcctatctagtaatttttcagttatctctacaccgagtttgcctgcaagatgatcataacaagttcgagcataacgaatttgttttagttgacctgattgttttaaagaacgaacttgaactgttggtgcgattgtccctaacttttcaagcacttctgcaacttcttgattagcaagtcgatagtaacgatgtctaccatgttgttcaactgtaagtaaattcccttctactaatttagaaagatgcgaactaattgttggatgtgacacttttgccatataagccaattcactagcaggtagtgcctgattattcattagacaatctaatatgattgctcttgtaggttcagcaattagtttagctatatatgagatattcggatatacattcatatttcgatgataccctaactattaaattgatacaattattttaagtttaatagtaaaggagaatgtattatgaatgcaattgatcttagtatattaaatttgaaagaaacgagaaggcgctcagaaaaattatggaattctcttcctaataattttcttaattggaagcctgatcctgaggctatgtcttttggtgagatgattcgtcatgtatggagttcaactttttactaccatatgattataaaaaacaacggttcaataaacgacatacgtatcccgtatgatgacgagccgattacttgtgtaaaaaaagaaattgaattggcacaatcatactttactgacttcatagaatatgttcaatcaataagcatagccgatctagattcaagacttattgatagaagcgatgttggctatcaacgatatttaggcgatatgctattacgaattgcctatcatgatgcggtccatgcaggtcaatttttacaatatttacgaatggtaaacttagaaagaccattaatttgggattaaatacgaaaaatgtttatacagcctccaaactggcattacaataagaatttttcaacaagaaacaatcacaaaaccatgataatcatttatattaaaaacctacatctcaactaagtacttcatacacataaaaagcacgggtttgattactaatcaaacccgtgctttcaaaacaactataatatccataaacaataaaatgtaaaatttaaaaactacgaccgaaacgccgcatccgccagcatagacaatgttgcatcatccatcggtggattatgcagtcctgctctgacgtttaaatagtaacgatggagcggatttttttctgataaactttttgctcctacgatgcgcatcgatttatccactatagatatcgccgcatttgttacagcatatttcacggctgctaattctgcttgcagtgatagtttatcttctgcctcatcgtactttttcgcaatttgatataaaaagacgcgagcttgcataagctcgagttctaattctccaactaatcttctaacattcggcaataaactaatagaatggtttaaactgtttggcttgtatgattccgcaaattgaactgcataatttcttgctgattgtgcaattcctaaataacatgctggtatatgtagcaaccagccaacacccttttgttttactttcccgccttttatatctgtaaaaaagcgactttctatctctacattttgtaagacaaggtcgtggctagcagtccctcgcattgcaacgctatcccacgtttcttcaatagatacaccgggtgtatttcttggaataacaaactcaccaacttcttcttggccttccatacttgctgaaataataaaataatcaagtactggtgccatcgttgtaaaagtttttcttccatttataacccacttctcgccttgttgaaccgctattgtttctggtttgccgccacgcgtcggactccctgttttcggttctgtcgctgccctgttaaagagcgcaccattacgtacttcttcgcaaaaccatttgaacatctcatcattccaagagcgattttccgctagctctttcacaatgccaagatgccagccaatcgataatgcagtagctccgcagccttccgcgattttctcttgaaataaaacaaagtcatataaagaaatcgcactaccaccaaattccttcggtaacgttaatttcgtatatccgatatctttcaaatcatttatattttcatacggaaatgatcccaattcacttagctgatgctccctttccatgaacttcggaatcaatttatttatttgtgcaataatgaaagattgttcttctgtttcaacaaatgagagtgccatactataatctcctttatgttcgattcatcaaccgctcactttttcattatgattatatgaagctacctctctattgtttcactattccgataaaaatacaatgtttttgactaataagaaaagttcctatttaaggataggttcttttcttatgttaatctcctttcaatgcctttaatggcaaagaggttacatatccaatatacgagaataattctttaaagaagaatggaatttctgtgtctaacgttttatatgctgatgtcggcgttggtgaagcatacgcttcaatattaatatgttttgcaattctcattgcgcgtttcatatgaagtggatcacttacaatcgtgtatgtgcgtattccgttctctattccaacttgcttcgcattttttaaattttcttcagtgaaaagggatttagtttcaattaaaatatcttcctcttttacaccttgtttcattgcatatactcttgcagtacgtgcttcctcaagttctgcctcgaactttgtaccacctgtaaaaataatctttttgatatttccattcttatataaagaaatcgcatgattaattctttctttaaatacaggagatggttttccgttccacgaagctgctcctagtacgataccagcatccgttttcacgtcatcatttgctttaaaacgataactccaaatatcgtaagctgcataacttacatataaaatagcagaacaaatcattagtaaaaatacttgaaagattcgtcttttcttactcttcttattttctttcatttgtaattgcctccgtacatcatccatacttctataaaaaacatttatatcaaatcgttttgtttgagtttatttaaaagaaggaactttacttgttatttatgtataaaagggttttcatttaaaattgaggattatcaattcattttcatttgcggttttcattacattttttaaattcataagtttattaccatacaactacattgtaacgaattttttctcagaagggaacgatgaaacaaaaggaattaaaataaagtagcattttgtaagaaaaaaggtatatttttcatgtctcacgaacaatatacctttcaaaacacgaattataacttttctttatataactctaatttttctaacaattgttcttttacgcctggccattcactcgagataatactgtacaccaccgcatctctcacataaccattcggtaattttctttcatttctaagcacaccttcttttactgcgcctaatctttcaattgctcgttgtgctttttcatttcttgcatccgtcttaatttgcactctcagcatatgcaatttttcaaaagcatactggagaagcatatacttacactctgtatttatactcgtacgttgtacactcggatgataccacgtttgccctaactcaactgtcttatcttctactgaaatattatataaacgtgtacttcctacaatcttattcgactgttgatctacgactatgaaaggtatttgagtacctcttccgtaaccctttatcgctttttgaacgtattgttgcatatcttgcacactatccattttagagattaaatacgcccaaatatcccgatttccttctacaatcgaaaacaaagtttcgacatcagtattatccattaaccgcaactttgctctttcgtgaataatttccatttttaagccccctttgttgttactatatcataagaataaaaacgtattataataatataaaaatataaagcaaagaattcttttcaaatatattcttctcgtataaggaaggtaggaagactcatcagtaacccttaaaaaagaattttttggtaattcccaataaattctatataatgataaacgggaggggataaaaaatgctagatcaaattacttggggaacgccaggcagcttattatgcttagggttcttttttgcgggactaggaatcttcttaagaagcgttacgtcatatacgaaaaataaataagaatatcctgcttttaaacaaaagaagccctctttttacagacggcttcttttttataactttatcttattaaaactttaaagcaataaataagcaatcggcgtaataataagtaacgttaaaatcgttctctgcacatataaaataataagttcagatacttttaacggaatatctgttgataatatacaaggaatggaagcggagaaaaacaaaatagatgatacggaaacaactgcaataacaaactttgtcacaattggtgcacttactactaataatgacggtaaaaacatttctgcaataccaactgatgcggctttagcggctaagtctgcttctggtaattgtaatagccatgtaaacggatagaaaatataactgatccaatcaaatattggcgtaaacttcgctaagacgataccaattaatcctactgacataatggatggtaaaattcccatcgtcataataaatccgtcttttaaatttaatgcaatatttttcataatgctcggtgcagactttgatacttctaacgcatcttcccaagcacgttctaacattttttctttataaacaggctctgggaacccttcttctgttacatatgtatctggttttctactgaggggcgggattcttacggtgatagcagtcacgatgaatgttacaacaagcgtagtccaaaaataaacattccataaatgcataatatctaatgtttttgcgatgatgatcataaatgtagcggatactgtagaaaatcctgtagcgataatcgccgcttcttttgtcgtatactttccttctttatacacgcgattcgtaataaggagagcaagcgaataacttccaacgaaggacgcaactgcgtcgattgccgatctccccggcgtattccataatggcctcataatcggacgacaaaatgtaccgataaattcaagcaatccatatccgactaataacgctaaaaacgccgagccaattggaacgagcaaacttactgatatgactagcttctcatacaaaaacggtccaacatctggcgcaaagaaccaagctggtcctacttttaaacaatataatatgccaaatacaacgccaactacttttaaaatagaaaaacaaatgtctacgatagatgcattccatttcttcgtataaaatggataaatcgcaccaattgccataacaaataatgcataataaggtactatgccaggaaccgaagccctaatccacgatacgatatgatcaatcataatagacgatgcaccgtttatcgtaacaggaacgaaaaacataaacactccaacgagactagcaagtataaaccgaagaataattcccttctcttgccctgtcttaattacattactctttaattcaatttcactcaaaattcgacacctcctattatctaaatattctgtataattatgttggattccttctttccatttctactatttcatcatataaaaaaagcctattttaaaataggctttttctactacctctcataatcatccacaatcacttgaatgatacgatacgattcttctgctactttttcattactatccctattcgcatcatatgtaattaacgccttccaaagtgcccatcctctcgctctattccacgtttcttcatccatgcgtaatacttcattaaatacatttctactattttcatcaaaaaacgtccacgccatcgctgcatcacaagccggatcccctactcctaaaataccaaaatcaattacggcacaaagctttccgtccttaacaagtaagtttccaggtgcaacatccccatgaacccaaactggcttacggtcccatgttgaactaagtgctacattccaaaggtgctttaataatgcctcgtcaaaaacatccttattattttcaatagcaactctcgcctcttcagcatatacagatataagcccgcctcggtaaaaattatgcgctccagctattgggccattactcgcatcaatagcctgcaattccactaaaaatgatcctaagtccgccgcaaattcatttaggtcacggacattttgtttcgtaatagtatctccttctatccacttattaatagaccaaggccatggatactcttcagatggatttcctttcgcaattggtgcagaaatcggtaaagaaagctccttacttaatataggtagccacttattttctttctctacttgcggcgcatatgccgcgtcacttggcaatcttacactcatctcatcccctagatgaaacgttctattatcatgcccactaaactttacaggcttcacttctaaatgtgcccatttaggaaattgttcccctatcaatcttttaactaaatcagtatgaatttgattcattcacttgccccttctcttttgaaatttactaagtccatctgtactcccaacatactcaaaaccacttcttttataaaaatcattcagcgtacgattatgtccaacgcaatctaacttcaaatactctttatcacattgtacattctcgtctatccactgtaaaaccctctctcctattccattccccttatattttcgtttcaccgcaaatctatgaatatataatgaattagaaacttcctctttaccaaaaatgtattcatcccattcattttgtttaggagaaactgtaatcgtaccaactatttcatcttctttcataacaacatacgtatatttctctcttatacattctagtatttcagccgtagcttcctctcctaaaagatactgccactgatccacttctttatattgtagccattgtgctacttcttttaataaaatgataatactatcactttcattttcagtagcaattcgaattgcatattctttacttatattgctctccatattgcctttcccctttcaaattgctaccatactgacaaacgagtccttccatcattttcatctgtaatatattctacataaaatccttgattccgtgcgttttcatacatcaattcaatcgctttttgatctttcgcataaatttgtatgcattgagcatccactgctaatacgattagctcacacttactttccttaaactcttcatatgtttcaatatctatcgttttttctcctttaggatatgcttttaaatctgcaaaaataagataatatatgttgtctttaactaactttttcaatgctaacccttccactacacttggttcttctggaaataatgcctcatccaattcaccacgtgctattaagtaggactcctcatccctcactcgccaatcaaattcagtaatatcaattgggtttaacactttccaaagtacattgctgtattcatttggaatatctacaaaaatccctcttttcatatgcttgctcctaacttattcattttcatacattatatatgaaatgtaattactatattttgtcgatacatatgtacatcataaaaaaccgctccactattagcgaaacggtttcctttttcttacatttaaatatttcattcaattgttgcactgccttttaaaataatttctaatatatgcaccacattagccgttcattcttaatgctcacttcgactttacaaaataatataaaaaccatactgcatgattttgttcatccgcagctattctccgtaacaactctttcaaatgtacatcggatgtctcatctgaaatttccaaataaaaatctactgttttttgttcatcttgtatagcgaactctaatccttgtaaatacgtatttgggcagtcttcagtaatttgtggtttcggctgcctgccagttaagttcgtataaatttgtacaaagttgtggaaatgctttatttcatcattacgaatttcaagaatttgtttttgttctacttgatttggagccatattcgctaattttgcatagcagcttatggcgctatactctccatttatagctttttcaatatcactaatcaacttatcattttgcctataacaatcataataatttgaattatacatcgtatccccccatactttcgcttaccattttatgcatttagaaatagtaggagcctgtgtatttaacgggacggctttagaatgaaagaaaagtttgagaaaagggtctattttgcaaaggaattgcttatgcataaaataatactattgtatactgttgctataaactctcgcgggagttaggaaaataaattcgcgaatcaacgattggttcaacatgatgcggtgcgaagctattatgagttaagtgacataattaggaggttccactatgccatctttatttaaaactatggagttccagctaaaaaccgaacgacttgacctgagtatgtgggaggaatccgattcagtttggatgaggaaattaattggcgaacgtggtgtggacatgccgaccctcgactccgttcgtaaccggcttattgagatgcgtaagaaggcagatgaaaatggcatttcccttctcactattcgaagaagagacgaaggcgatttcatcggatactgcggcttgattatcggtcgttccacacttgaagagccggagattgcatacgagttgttccgcagcgctcatggtaaaggttatgcgactgaggcggcatctgttgtactggacgcggcgattgctactgggcgccaaagactttggtcgactgtaggtgcttggaatatcgcttccctccgggtactagaaaagataggatttaagcgtcatcacagtacgtgggatgacgaacgtggtgagattgtctggaatgtacgtgacctttagaaatcccgacttaattctaaacataacacttttcaacaattaggtgtttacattgaggaaaagccagaaaaattaacaaactttattatcagcaaatattcattcttcagcttatagatttcatcaaaaaaagccgtttcactaattatgaagtgacccccgaaagttagacaggtcgtttcattaggcagcctctagggtatggaaataaaaaccagtctatgacccatttttacacgtatctcggctgaacccctacataaaatggatcttgtgtctcaggcttttctgtttcaggtttagtctcaggtttagtctcaggcttcgtctcaggtttagtctcaggtttagtctcaggtttagtctcaggtttagtctcaggtttagtctcaggcttcgtctcaggcttcgtctcaggtttagtctcaggcttcactttgtcttcgctagatggcttgccaagatcttcgggcttcgctttgtcttcgctagatggtttgctaagatcttcgggcttcgctttgtcttcgctagatggtttgctaagattttcaggcttcactttgtcctcgctagatggtttaccaagactttcaggcttcgctttgtcttcgctaaatttttcgccaagatcatcaagtttccctttgtcttcgctaaatggtttgccaagaccttcgggcttcgtcagactcgctaacttttcgacaatgttattggtagaaggttgttcttttgtaggttctaaggaaacaattaatttatttgatggttcagtgttattatggttgattgtttcaagagaaggttctacaggttctataacatctacagttttttcttctttcactattacatcagaatgaggttcttcttgtttagttttatctgtttctttttcattacgatccctttttttgtacttctctacatttttttgatttgaatcttttgcttgttcatcattattttgagtcattacgactgctgttgttacaccgccaccaacaactacagcactaattgcaccaattacagcttttttacctatcaaaatttttgtgaataatttactcatttttactaacccctttttaattgtatttttataatatagtaaataattgcttataggtatataataaaccatatgtgttttaaaatcaacaaatatttaaactaaatatggtttattttgttgttgtaaatctagtgtagaagttaatattaaattaaaatacgcaatataacaatattaggttattagctaaaccaaatgtagtttatttttaaaggtttattaagtataatgaatataaaggaaggagattatatgcatgagtaatgaacagaatcagataagtcacaagaaagatagaaaaaatagcactaaaagtatagatcagcgattagaaaaattagaaatgacattaaaattacttgatatatcttttgatgaattagtaggccttgttacgtattatcgtgctgaaaagcaaaagagtgatgaacctatggaacgatcaggacaactaaaatggaatctagataaattaatgttagaaatgaatttaaacatagatcaagtagctactattgtaggtctacatagaaaccaaatagggaaaataaaaaatcatgattttaaacgtacagatctaaaaacaatagaacgaatttctaaaggattaaatgtatcattagatgaattatttagatatgaaaaagatgattcagtctaaaaagaaggtaactcatttgtaggagttaccttctttttttatgtgttttattaaaaatggtgttttcatcaataattaagtttatttttgatgttttttaatatgtattcattcaggattctcaaattagtttctataggcattttgtttgattgatacctattgtattatggatgcctacaaaaattgatacaagttaatctgaagtgtcattttttcgttaagtatattatattttgctggaataagaaaaaaagttatgaatttataaatagatgaatattttattgttttttaggttttttctttaatggtaagccataatgtttagcatttttaattatttttttagctagatctttagcttccgttttcgacatattcatacagttttcctctcccctactgttttattatttgtatgtccaataagtaggggacttaaacataattctgaaaattaggacatatattatattattccttaggacagtaagacactgtacaaattcttaaattacaaatttgaaaggagaatcgaaatgattgagcaagagaggaaggtaagaaaagataaaaaagtagatattaagccgacaatttcagtagatctcaaagaatgtatttacagactttcatatattacaaataaacctgttaaagatgttgccttacatatttgtgactatgctctccattcaaaagaaattatggagatattatcggaaagttttcgtagaaacttaacgatacacaatactctgtatatgggtgatttgaatagaacatcattagcaaaggtaaaaaagaaggaagattacccaaaagagagaatttctttacgtgtttcaaaaacaacttatgaaaacatttgtaaattgaactatgctctagatgttacaccaactatggcaactgctattttattagaaacatgccttctatattcagattatgtcaatgaaaacgctagatcttatcttgaacaaaacttggatcttaaacgtataaaagaattagaaaaggtaataaaatatgtaaatgaacataatccatatgaagaagaagtatcgtggggggctttattatcatttttaatggatgaaattaaaacaggaacgactaatgttgctcaattaataaatgattggttagattcatataaaaaattgaaatgacaataatcccttaatgattatttggttttcttatttatttataaattagtggtacgtgaaattttatatattatgaagataagtcctaaaaaataagcattgaatctgattcaatgcttatttttgtagttaaagtgataaaatcttttaaggctttattactttaactagttgttctccttctataatcttgaatttattgtctaattcacttgtctcttcaattactctgacactcttttcgattactttgacattccttatatttaattcttcaataatcttttgatattctttatactcattttctttcattacgataattggttgatttcttgctacaatcttgaattcgttacttaattcatctgtctctttaatctcaaacgatatatcttccagcctattaataaccgaaattagatctttccatctttgttttcttacttcaaaattaattattgtaggagaaagccacataggaacatcaatttctatattattttttttatagacttgtaggaagcaatcctcatgatcctttcgaatgacttgtacttctaatctatattcaccaatttcacaaaagaataccacttcattattttgatgagttgtatcttttaaattaataatatcttctttaaaaaattcatctgtctttaagtccattacacttttcctccctttattgttttaaaggtacaaatgacttaatacaaacgctttattactgatatataaattgaacatgtaatacagaaacagtattttgttttgtttcagcattccagtaaacattaattccgaaataagttccaccataatctttttggatcattttatcaataactttataatcattagaagatgtattgaatttttgaatgtttactgattctacagcaacttttgttcctttaggtaaaaatgaagggatttttgcatcttcccaaggttctaatgttccagctttcacctttgcatcttcctctgtgatcttaccgcttgcaatatcttgattcaagctatcaaagtatgatttctttactcctgtatagctaccgtaatttccaagcttttgacgtaatgcactattttctgaagactcttttggaggtgcaacataatatggtgaattcacttcatcattgttatttccattgttattttcattattgtttccgttattgtttccattattgtttccgttattgtttccgttgttgttttcattattgtttccgttgtgatccggctgttttttcatagtattgtataaaaattgtacgtattgttcacgtttcacaagtgtttttggctcgaatgtgttatttcccatccctattgaaataccatttgattgcaccgcactaattgaatctgtagcccaataatttttttctacatcatcaaaagtagtcatagattttggttttaatttaaatgctttcgtcaaaacagatgctaattgttcacgagttaagatgttttctgcgccaaaagtaccatttccgtacccattcataatacctgctttttctaaagctttaatttctttttcaaacatatgacctctaatatcagaaaatgaacttctaaagcttccgtctacatctgctggttttaaaaagttatataacattctagcaacttgaccacgtgttacattatcaccaaaaccaaagatgccatttccataaccaagaaaaatttgtttacttcctaaatcatttatagcttccgtagaccaatgatttgctggtacatctttaaatactggtgtttctgcactagataaacttgcaccaaagaacatactacccataattgaaaatgctgtcgttgtttttaataatttgtgtttcattataaattcctccatttattataaaattagaccatttgtatattatagcaaattgatataaatgttttatccctatagtcaagattctctccgaaaaatacaagtccctcatattctaagttctctagataattggctacatagggatatataagcggttttcccgaaagataacgttttgcgttacttcctttatgttctattaagaattcacataattgtctggtactaataatttcatgttgttgtataaaagatttaataaaacttttttctgattctgataagaaattatgtaatactttattataaattggcttagtgttaaatccctgctcgatccctagtgtcattacttcatcgaataaagaaatttgattaggttctgtattgttaaattcaacagattgaagatttatttcatgcttagtatgttcaaacaagattcctattaatttatttacttgcttatctaataagggtaatttgagttctagatgttcctttatatcccttggaatctcaatatttaatggaagttgaattccttcattattttctaatgaccaattgtttctaagttttattaatatttcatctaactcataatctatcttagtcattccctctataacttgtttaactatttcggctggaatattagtatgttcttcaaagtgacttttaccgaattttaaaattttatttgtctttaaattttttacaatgtattggtaacgtaaagagcgtccacattcacattttagtgtctctgtaacaacacctgcatctatataatcaactaaacgccaatttgttgaaatgtgcttgtagtcttcctctgatccttctcctttttgttgtgccaatatactagcaaaagcggttttctttcctctttttaaaaaattcgtcaaatattcttgttgtacatttgataattctttaaatagaatatctctctccgtctgcgttaaatatttagctaccatatttcacacctcttttatacagccattattttaatcataaggtctatatttcaagcgtaactttttatactctaattctttttctaaaatataagagcgcataaacaaacacacactcccgacttttttcaagggttttagcttaccttcacgaattaatctatttactctatctcttccaatatccaaaatttcggctacttcagaagtagtgagaacttcatctttaataaagttctccatttcttctttagaactaaatttccaattcatccgtatcccttcctaagaaaaaatttattgttcttaataccatatataaactaatcatagaaattactactaaatcaaatttatctactttgccaagatccattgttgcaagatagaggatactagtaagaagtatcccactatctgttttattaatttttaatgtattgatgttcttcattttaaaattaggtgattagtgtgttataatatttctgtggggaactggctgtcaaccttccccacagataaatggttatcggtgcttgcgttctttacgctggcactttttttgttttgtagtctttttcttagctttttttctagctttagcttttgcctttattttggtatgtatatctaaacttacattgataatccccaaaaagctggcaataaagactacaacttttgttgctatttcaatcacctatctccacctccttgattctattataccatacctgacctaaaaaaagtataggtttaagcaaaataaattcaaaaatataaataaaaagatattgttttttcgttgtctttaaaggggttttatgctttttggtagaggctggctcgtggtgtgcggacgaaaccgcacgatcttagcgtatgaacatatagagtagagaataattaaggatcggaagtgattagcggttcggcatactaaaatagtttgcacaagctgatagaaaaccttagtaactttttggtcttcagcttggcaaaagccaaaaagtatgccgaatttctttcgtcaagaatgtgaacagcgtgaacaaaggtggagatttttgagtgttctttactcaaaaatactacctgtttcttgatgaaaggaaagccctttgatgtatacagtatcttttcctacaaaaaaaacgaaagatttatctctttcgttttttgtatataaagaaaatgagagtagttgttacttaatttgactttctatttctaatttcatttttttccattacactacatagttttgctaaaccataaaacaaacctattacacaaaaaagtattaaaaaaggtgtaaatttttctacagcaaaatcccgcatgatttcttgggcttgctcgggttttgttatgatattatgcctgaatgtcaatatatctatattcatttttacagtagctacacaaacaagtacaatgggacataagatagctattgccatcattaaattgttcaacaaaaattttaaaagctttttcattatgatcctccttgtaatttatattttgtttttataatacactcttttatttttatttatatactttttatattgttgtgtactttttactagataataaattgaaaagagaagaagtcccataaaaggaatgatgctagaaagaataattctagcaataagagagtctagatccgctagatacatataaatgaaacttccttgtatgaggataattgaaagagagattataattatatgtatgtatccagtcctttctttttttaattcatctagttgtctataatattttcgattactaattttcggtttcatatgtaccctccataaagaaaatacgaaagcatttgaatagcaagtaggcatttgcctacttgcttttttatgttttttcttttccggtgcgtccagcatgtgccttggcaaactcaggaggaacttacagagagtagcgtgagcgtactctctgtagttatccctgtgtttaatgctgtgagcgacacatatctccttgttagcttctgaaacgcctgtacaggctttcaggaggttataaggagtaagtgccaccgcccaaaggatctaatgtttaaatctttaaaattgaattaaattctacagaataactcttttattcaatcctcatgcttcactttattttccatccatcttgctaactcgcttagttgaatatcctctcttttaatatctgtttctgcaatatacggttcgacaacacaattattcaatttactatttaaattaatgtcaagaggattaattgtagaggttttattttctagatttaaatttattattttgccaccaaatttttcaattattttattataatcagtcataagtttatccattgttcctccccatttcttaataaaatttaaatttgattaaaccctactatctaattcagtaggcttcaaaaatcagcgcaaaaaacataaccataaaaatcaaaaatatcaaaaaatagacacatgaaattctcatatcatctttattcatattatctgcgcccccttctttgtgaagaatttcgaagcctatttatcttttcttttttttcagatttgtgattagttgaaccgaataataaaaaacgcaaaaggaaaaacattgcgcctaaacctaacaagctacaaaaaacattccaagaactaagatccaccatcatattattttccgcctttttttctataacattcaaatttgattaaaactctgcaaagattcttctatttattgttcattttcaataatgtaatatccttggctagaaattgattttatacgctttaaatcatcaattatccttgcatttaattctactatggttctacttcccccatttcgtccatcgagatcatccaattcccatagcaaacttttctcaccatcaaaacccttaaattctgggttaattccttcttttaaaacttttatggcatcttcacaagcatgaactagatcttcaggagaaactaattctaatttctttgagtttggaggttcaaattgactatatatcggaatatgtattccataatttgcgtatacagctcttaatgtcccacttgttgcgtaagtaaatcttaattcgccttgatcaaaatatcgtatcatctcattaaaatcattttcttcatgttctacgatttcaaattgtttgaaataagtccaagttactcccataaattattcctccctacgttttatacaaaattcaattgtccttttcaatcattctctctatctcctagcttaaaatagatttaatctacgtatttaaacgcaactggggaagctgttaattcaagataaggaagctcattcgcttttgcttgtctacaaaactctttaagaagtgtcattccttcttcgatacttaatattttgtagaaattactgtttatatcatcaataaagaattcaattatttcaacactatcaaataaagagttcgagtctatttctgtaattaacttctcattgtctatatcaatttttacagacaaataattcgttacaccatcaagagcatcctcttcaaatttatgagtattaaatttaattgtcgcatcaaaagaataatctgatttcaaatcattataagtaaaaccatcccaattaaaaatatatccatatgctatcttcttattttcccctttactttcttctatataattgacgtgttcttcagtggaattttttttattttgttcaacatcatccaattttctaatttctttacttgctctccaataagaacgaatagctgacattgcatgttcttcatcaggtacgtttgctatctttaggtaacatttaccctgataagctattacaaattcaccttcaaaatcccacttttcatcctgctcaatttccctatataatgaataatcatctccatctctaccttgaattaaatagtttggtattttaaaatttaatcctttaaactccgcttcgggtggtacaatcactttcgtagttactgtatccatgattcattcctctccttttccaagttgcgataggtaagactttgaagttatctccatcttttcccccgcttagcactgtacgtgcgactttcatcgcatacagcgccccatcttattcttctatcctaaagcaactagattacaaacaatgttgtactcaccaacgtattcattcccttttcttacgaaaagtcacatcatcttactcgatcctgtgagttacatccagttgatttagttttcaaagaacaagactagggactatccctccacattcgttacatgcttcgtcggtactgtgtccccaccttcacaagaatgaagcaatttcggttcgttagaaccttatatgcatctgtccactagtagacgttcatgacagtttcttgcttaccacgttccgattgacctagctatacatatatccttaggtgcttgctttaagcctgttatctttacatcctcattgttagatgttccgaatttcatatcatttactcttacttttcggtagataacgtcgtcattgacgacatacacatttctaatgtattaatagtttagacccgtacattcgcaagttcgccagtccgttaggacattctcaccttagatattttgtagcatcccgacctatccattaccatatgatttctcacttaggttttgttcagtcgacttcacctagcttcatacaatttgtgactactatcacgctttgcatgtaggagtatcagataagtagtttcagctcaacctgacggctttcattcctactttcagtcaatcagttgttgttatcaaattgataaccctcctatttcgtgtttgcacacttatgaggaaacgtgtcgcacaaataactattttgtttaaatttcatgtagttcgccgatataagctgtaacatattgaatatgagattcttgattattttttccgaaacatgtctctattcggtctatgcttatacttggaaatctttcttccaataagcttatcaataactttttattagtatcgttatctactaattgcaattcgttatcttcttttataaggacgaatccccgatcacgtaattgttggattttatctacttcatcttttttatctgatattggttttttgctaaagattctgctaagtctggttaaactaaaagcgaactttacattcaatccaccatactcagtgaaggtcatttcagaaatatgattaaatccaatttctctccaccagcctttaattttattagttaatgcattaagttgttcactcaaaccatcaataggcttcatatcagccatctttttttctagttctctaatacgtaaatttgcattcctaagatcattactacgtctttctcgttccctagccaagtcagattcgtaatttgtttctttagctataactgaaatatgactttctgataaagaaataagtgtccccttcatttcctctgttaacttatcttttgataaccattcatgcatttgttgtgctgtaaaatataaatcttttaatctctttaaagtgaccgccttttgatcttcattcaaaacaactaatgtttcttggtttcccatctctcattctccttttctcgttttcttgtttttgaataaatcctgtacgctttttattttttttatctttttttataatttctaggtacatacttagatatatttcattcataaacttatctatttttactccctccgatctcgctttaatcattgaaagatataaggaaagtctattaaatttgtaaccactcttttgtgagaattgtcttcaataaattaaacttagaggtctttttatcaagacaatgtatgttagcacgatccgcattgtacccctttatacataaatgtatcttctcttgaaacgaatcagttttagtagatgcttcgtatataacctcgcatccaacctctttattgtctttatataaaaccacagtgtaaatgttaagaatatccttcacactgatccctcccttaattacaaagtaatgtaacaatatctactgctgtattatccgctacttgataatacatttctaagccacgtctttctgattttaatactctcgtactttttaattttgctagatgaacagatacagtagattgtggtatatctaattgtgtttgtatttgagttacattgctaatcttacatgaaataaggtatcgtactatttgaagacggatgggatgccctagagcctttagcatatctactgatttttctgttacagtttgtaaatttttttctactagtttcatattatacattccttttatattaattttgtaatgttgttaactaataatcttgtaaacatttgttctataaaactcttaatctattaaccataaagtattcatgaatactttatggttaatagaacctacaatcttttaatatcataattacattatacactaaatatagtttaaaataaacaactttataaactgtatttagtgtatttttagtgtcataattaaaaggaggagatataacctcgtccttttaattaatcacaacttgagctattgtcattgctactatcattatagttattcgaggaattatcaggtgaacacatcccacttgatttgtccgatccattatcattgtctagtattatgttattaatagtgcttgctgtgattaagggatctactagatcactagtatttctatgttttttttcctcagtaaaatgatgtacgtgtgattgtctattggaacgtctaactatattggttttgtcgctagatatttcaatttcttttttatccatgcttactttacaagatttcaaatttttatctttcatataatttacaactttatctacgtcttttcccataataggttcttcctcttgtttaaaaaagagcgacaatccttttgtgaagaaatatcccattaaaacaaccaaaccgagccaaacaaaaattcttattagtaaaaaccaatcaaatgctagattttccatattttcatgctcccttcatttgaatcttatttacacactattcgaattcatcaatacggaaatcctcataaattttcggttttttcatagttggcctattcccttcaaattcaacattatcagaccaatttatttttacttttttataaaattcttctaactcttttgatgttaaaagagacaataaaaaacacaactcactttctacctgaagtaaacctgaagtaatatatcctctttcatattcactttttttacctgcattactaataaaatcatgcatacctattaaagcaagcatccgattagtaaatttaccactgttttcatcgttattaaaagcttcatattttgcaaacatataatcattcctttttatagtgttcttaatcttttatccaaaaatccatattcctataaacaaataagcaaaaagcgcaaaaacaaatgcaaatccaaacactagacatttaccaaaggacatacttttatgatcttccactgattatttttcctttcttaatgaattttattccgtttctagcaataacatatttttaataggggattctgtttcaagttctttcccatcccttatccatataacaacgtcacgttcactatctaaccctctgtttatagtttttacacatagggctacaccttcattttttgagatgatatttcttacacgttttccttttatatcaaactcttttttcatattctcactccgtcacattctctatagtcccaataaacataaagttgacattatcatatttgaaaatttctattttattaactccttcttcatttacctctagataattacataagatggtatttgccatataaccagcttcctcttggttttctaatagatagctatcacaatctacaacagtattatccttctttgctacaaatgaatatatatctttcaaaataattcatccctttctccaaaatccccgttttttttgatataaaattcaaacactaaaacttttggcattctccattatactaagatttaatttcattaggttttttaaataaaaatcgtaatacaattataattgtccaaatccaaagtattactttaccaatattaagcaatagatatgttttattttgcattccactaactatatttgttgatacagtaggttctgtataaaaatccagtgaaaatagataagtaatagcttctattaatcccattctagcctgtgctgggaacacccaaaatgtcatcggtattacaaaaaacacaccaatccaaacaacagccccccaatcaatctgtttgatattatggataggtctttcaatcaaactcatgttatttatttttttcatgttcattccaccttttcaaaaaattattttataaattgaagaatacaaattacaattaagcaagtaagcattgctggtagcataatttttaattcatccggtaattctttctccaaaatagcaaatattagattcactattattgccaaaaatataaatagagctaaagatccaagaaacattattggtatgattgataatgaattcatttattttctccattcaaaactaattactttttatatcgttataccatgtattgctataagcattgtgcctgtcagatatatcataaaaccagctaatgcaaacatcttaagaaattcgttatttttttcactatgtccattaagcattctataaagaacactagcattaaaccctaataaacataaagctacaggtataccaatataccactttcttaaaggagcaaatatccccgaaaccacctcttgtatagccatttcattcgttaatccagcttgttgtaataaatcacccattgatgataaagcaagaaacattaaaaccatgaaaccaaatatactaaaaaacttactcattttatatcctcctagttccaaataaaatttgattttaagagagttctttaattctccatactccctctagttggtacttgttaacaagatattttaagaaatcaaaataactttgtcccgattctttatagtcccatgtttcatctaaaagggtagtaattacattaatttgtcctctaacgaaactggattttacatgatatttcccatcattttctgatttttctattcttataaactcattaatccgttcagtaagcatttctctaatagcttttgaggatagtataacttccggtatttccatactcatattttctaaattaaaatccttagcttcttgcttatgatatttaacgttcttattagggttttgtgcattataaaactccctattgaactctcttagtttattcaattcttcatctgaacaatgcttccatatcataccttcatctaatatcctttttttctcttcacctagaagtcctcgatcccttatctctttcaccatattttctaaggcttccaacatatcgtctactctcattttttgacctaaaatatctctattattttcaagaaacctcatgtacctttctaattcttctaatttcatcaactcatatcaatcctttcattttttatttaaattattactagtaaatacaccttcagcttttaaaaacctttcaagagcatcatataatttcatttcgttgctattacaatactcttcattgtcgtgaagaacgcttgcttcttctaatgtatccaaattacgccataattcataagacaacttatgtactttcttacgaatttctttaagatcaacagcttccattaaaaccactactttcataataaattctaaaactattaattttttctatttaacgccttttccaaagcattttaaacaaggaatttttatacctgtttcttgtaatccaaaaccaaatctatcttctttgattgaataactcttgctaaagacaaacccttttccattacaagatttacattttctaactctcatttctcttatccctccaataagtattcttgaatacctccgtttttaaacatccaaaaattcgcttatctaaccgactatcttattatatcatattttattaataaaacaaatatagtttattgataaaaataatgtaaactacatttattttaaaggggtgggtggtgggtattgatataaagaataagcgtagcttattttcaatgcctttatataaaaaatgagaacaagattttctatctcattctcattttttataactacttgatatattctccaaagctaaatttttcaatatacattttttaagcataggcattacaagttctaaatttaaaaataccataaataaaattttgtatgtaggaattgaaaattttacaagtaccgtccataacaaattaagaatagagtttgttacagttgtatttgtcacatggttaagatccaccaagaaacggtctattatctctacattagagataggcattacacataaaaaaataaatgacacaaacaaagtaaccacaaaaggtttaaaaataatattagttattgtttttggtaagctaaatataatgaccacctactttgttaattttttattttgatatataagagaataggctacattgtaacagttattccctatcttatatcttatttattatataaaaaacatacaataaatatagtttaaagtaaatgtttatttaaaacacatttagttatattaataaataaaaatggaatcattagattccatttttatgctcgctttaatcttttcttcggctctttcacagttctacttaatacatcaaaggcttcttgaatcatttgtttttcatcttcttttctttgtaagtacaactgatactcttgaaccaattcttccgcccaatcttcaatttctttatcttggtttggttgatagtccatgacattactgaatacaggaatatcagcatatctttcttcataattaaattcatcggctgtttcatcttttaattcataaacaaatccttttaaaacttttttcccgttttccatatcatgaatcaactcaaccataatttcggttttttcatcatctaaaaatacttttcctaattgcattattttacactccttttaaaatagtttttctaaatctaactctaactgaaggagatcactttctattataaatgaatcttcgctttttatatattgtccaccttctgtaagtttgtaaacatatgctttgtttttgaactgatccagtatccaatattcctttacaccattcttttcatataattttacgttctccactagatctttatccatattagaatgagataatacttctacaattaaatccggtgcgcccacaatacaattttctcttactatattatgatcagaaacaacaactgaaagatcaggttgaggtttggcatgtccaaaacgtccttttacatttcttaaatagacagtgtagggcgcaaaaatactgacatgcttcatttctaattgttttcttaattcataatatacattccctaatattaattggtgctttgtactaggtgttttatgctgattgaaactcatgtgcatattcccccataaaatcattttttcatttggcttttcatagaaactttactttacatactaccaatagtataattcttattaagataatagcaaaagacaagttgcaaccttgccttttgccaatgctgtttagagtgtgagggtcgattcttgcactcttttatttatgttcaatgaagtccatatacatttcacatttcgggcatttctttttgggtatgatttcactactccaatcaccttccttgcattcttcacacacgtattcaataaaaataaaatccctatgctcgtgttcctttttctttttattaatagtgatattgaacatatgcatttgctaaaaaccccaagtaatgattgatatctctattataaaaatctatttttcgtatttgcttttcaattactttttgttcttctattggtgcttgtttaatcatatctataacaatttcattttcaattacatgtgtaagtcctttatgtttaataacaaaaatatcacttggaatgtgcttttcttcaaaaaagcgttcaataaatgtacgtgatctttcttttactgtatacatattatctcacctcctttttttgtccgtcttcaaatcctaaataacatgctataatctctaattttcgattcatattttcttcccctatccattcatataattcttcttcaatctcttgtcctgtaacaacaatactctcacgttgatcgcacatactcgcaaacaattctatttgttgattcgtataatccatagcattatcccattcggtgaataaatgcacatgctgttttgattcttctagattccataattcttttacaacaataatttctgtatttttcatagaatctaatatataccctacatgccattcttgatttttatctgatttgaaaattaaatttacttctccatcataaggatttagtttaataaccacgtcctcattcatttctttagcaaaagccttataacaaaagaatccagcttcatacttttgatatacaatgtcttggatctcaaaagtattttgtctttccataaattcttttagatcttgaaagatttgttcttgcatgttttttaatgttttcatgttttttctctccttttttttgcatttgcattacgcaaatgatcttcccaaagggaattatttttgccatttgacatgaagcatggaacatccgcataggaaagttggcaagggttttagctgaaaaaattttatgtccgaatttttttcatcggaataaaaatttttcagccccttgccaattttcctgaatcacttagcaaaaaacaggttaaaccgaaggggaaactttgacctgttttttgcttagtgattctgcggtatgttacagtgcgtagtgcaaatgcaaaaataatataaataaaaaaagtaggcgttagcctactctccgcttttgatcttttgttttttccggttcgtccagcatgtgccttccttggcaaactcaggaggaacttacagagagtagcgtgagcgtactctctgtagttatccctgtgtttaatgctgtgagcgacacatatctccttgttagcttctgaaacgcctgtacaggctttcagaaggttataaggagtaagtgccaccgcccaagcctaaaaaagcacttattctcccttttagaaagaacaagtgccaatattctaattatttatcataaaaaatatctaccctacttaatcattaggtatttcaacagataaactcggttttgctggtgatggtgtttctccaccattaagtgacgcttgttttaaactactaaaactattgatactacatgctaaagtacctactaataccatgcctaatacaattttctttattttaatcattatttcaacgccccttttctcaaatgtttcttgtctgcattgttactgatataaaagtatttacttgctttaacatgatcatcagtttcatagaattgaatggccaacatttcggcatattcttttacgcaatcccacattccttctttttcaaaataagaaattgcatctgtaacaacttgttctaaacgtgctttaggtaattctgtgactaattcatttataactgcaaaacgatgcttatattctgcatttcctgattgaattgcgcttttcattccttgttctatatgttgttttgctgtttcaatatcacctaatttataatatgctctcgctagaacaaataatgctttataatgattcggaattttatttacgatttcagaactatgtcgaatagccaattcatataaatcttcaatatggtataaccatcctaaattgtaacgtacctttattaacaaatgttcttcatcattctttttaagaacatctattaccttattcagacattcttcagcccttccgaattcccgtaaatctatacaagctatactgtataggttatcacataatgcatgattgatttcatatcctatatgatttgaaaacatttctttagcctttaatacatgctgaataccttcaaatggttggtatgaatgatagtaaaaacttgccattctatattcaaattcagccttttcgatttcatcaggaatataaattaaaagttcttccgctttatcataatgtgcttttgcatcattgtaattggacaaaattgtagaatgtattgctttaaagaaatgataatagtaagccaaaaataaatattgatccttgattcccgaaagttcttctaccttttcaaacgattcctttgtaatattaattccttctactaacactttacatctaaaatcaagtagtgaataatagagtgaaagatattgatctgtttcaatttcttttaaattttcttctattttcatttttaactgattggatttctcgacatgatacaaacggatttcttcataccattcattcaataatcttattaattgctctcttccttttgtctgaatgctcataatatcccccttctttctatatacagtcttaattcgataataacaggaattgggtacaatgaattttactacaagatttctcataaataaacagaatattctgaaataaaaaagacatatcctatttttttatctagggatatgtctaaaatgacgaatcataactattataccgaattctagttgtttataaaaacattatgttcactttatattgttgctttgaaatattgattaaccgtcatgtataattcatatacagggttatgggtaggtaaatattcaaaaaaggatggaagaatgtatatgataaaagaaattccatttcaagaaggcgaaataattctttttaaagaagcgaatttgtggaacgatttgcttgaaagatgcaaaaaagaaacaaaaacgattaatatagcaacatacaattttaattttaagaataaatacgaaagatccttttataaggagttatctaaacttgctaatttaggaattgatgttagcttactatattcaataatgactttttctaatgaggataaattagagatagaagaaatatttaaaaatttcgtgttgtgtgcacagctaaaagccaatcactcgaaaatgtttattacagataatttcgcatacattggttcagctaattttagttttagtagtaataataattacgaatgtggtgttatttttaataataaagaaattgtttcaaagatacggaaactattcatgggggaaatgcttgaacaaagcgaattcacaaatgtccctacatcttttgatccattttattttttacctagaatactaaataatgttgaagaattaagtaaagtagaaaaaaaagagtccttgtatattgctagtaatgtagaaaacatagcacaattgcgttatttagatgatttagagaaaaatttaaataaactaggttttccaatacctatacattttgattggtggaaacttttttgggaacttgaggaaaagaaaccaatacctgatatcacatttaataattttaaaaactatctctatgcattatctcaatacttaaacactgtaatagaacatgttaacgcacagtatgagagcatcggaagaatggaattactgaagcgaattaaagtaataaaataaaatatagacttgaaataaagatcaatcaacctttatttcaagtctatatttagataaaacacctattttgtttgttccgctttaatagtagaaataagagcgaatgtaatcacatcaaataatttctcagggcaattggaaacgaaatgtgcaatcgcaatttctatcacttcgccaactgtttctacatcttttgctaacattttgattctttgtctttctgtttcatcaattctcacattcaatacgactcttttatgtgagacactaacttcttgatggatgatttctttcaattccttcattcttttactttgtaaaaacggttttaatgatgctacattatttgtctgtttaaatacatcatcaatcatcattttcaaaaactcaggcttattagtcgttgataattcagtaatggtagggtaattaaaatgttttataattagaaattcagtaaacttagatctcttatatatcatgtaagttgcaaggaaaacataattcatgacaggatctattttgtacgatttgttaggtattgtattgtttgtatccatttttcctacctctccaatacatataaaataaaaaaaggaaacaataacgagttactgtttcctttaacaatcaattagttcgataaaaatcaaaggtattataagcatcctctataatctcaacagtaacgatatctcttttgataataccatttttccatttcgctgtgaacatgaagtaaatattacctttttctaacttcgttctcggatcagtcatggatggttcaaaaatatcaagattatatattggatgacttgaatttaaaggctttctaataatgagatcctgtttgtttacttgcattcctttgaattctaatgtaacaaattcaatcggataatttgttacaatggctgacgtaacaaatttttcccctgatacaaattgctccggtaaatggtttagctttttatgaatttcttgccactcttttgtatgatccactttccctttaatactaagtggttcagctttaaaagagactttcgcttctcccttttcaccatgaggatctgttactgttgctttaaattcatacgatccatcttttatcgaatctattttatattgtaaggtcttccctgatatagctttcttttcttcaaatactttcttccagtttccttgattctctttcatttctaggataacttgtagcttttctttatctctaggatcttcatcactcggtaacatttctaaagtgacattatctccttcaaatactggattagggttatatttcaattcaattttaggtactgtatttacatatgggttagtggaaacttcattgtcgttttcatttatctctttaatcacattttcatcgtctacttttgctcgaaatgtatgatcccctgaatcttcagccttgaaagtaaaatattttgtagccttttctccttttttcatgctcttaatatctattgtttgtagctttttattgtcttggtaaaatgctattttaaatgcttttacatctaattcaccatcattaataaagtctactttcgccttatattcttggcctttaactaaatgattaatagctttgttatttgaatctaaaatagtaatagattgcgcttttaagtttgtcgcccgaatatctccaacatactcaacttctacatcccattttccgcttgtatcatactcattccaatgatcaaatacttccttagaaagtttacctttataagttgcttttccagtgaaatctttgagaatatcaggcaagttaaatgttcctctatattcctgagcatatctatatccttgcacttgctttatataatcaatccatacacctttacgatatctattagtcctccccgattctgatttccaacgataaccgaactgtgctgttttataatgccatcttggatcttcagcatcttgtacgtcccattcatcccatccccaatcctcaactatccaattctccttatcaggctctaatccgtaatatgtatcaggtttaaggggtttagaatcactgaagttatacatatcaccataataagtatacgggttatatgacataaatcctaaacgactatttccagcaccatcatagtattcagctcgtccctcacttcggctctgtatccacattcctttagaatccaccgaatatttatcacccaattgaggaacttggaaattaagggtttgtccacttctttcatcataatagttcttcgatatactagatggtgctggcgcttgccacgaataccttctaaatatgttgtcttcccaatgtccatctaggttaacagttctatttgtttcccaattttttgaccactcgacatttcccactagagggattttcccttgatacccatcttcattaattgtcacttcttttggcactaacgattgatcattagtatggtaggtattactaactgtttttgtaaactctttggtttctgtgcgatagatactatccttatgatgtaccttttcttttggtgttaatttaatacgtgtagcctttagaataccggtttgaccatcttgatcataagcgatgctatcaggataatcaccgtattcttgatttggatagggaacaattttcggattttcccaacgcatatctttctgaatttcaccataatgtatccatcttgtagtttgtttttcagcatgtgcttctttgacaggatattgaaatatgctacttactatgagagaagacaaagcgatttttaatactttatgtttcatgatatctcttcctaacttttaaatttcacttgttaaaataaggagaaaatttatatccgattgcaaattctgtatattgatcggagcattctttataagctgataaatctatttgctcgctaggaggttcgatattaatagtaagtcccctgttttttaaatcttctatatcccatacctccacttcaaaggcaatatccataataggtgtactattattcatttcttgtttttctagcattttcacttgaatactcatagttacatttttatctaattcacccttattaggattaagttcatatattttttcagtgtattggacttgattctcctgataatttttttgagaatctaaaaggaatttttcagcatgataatagattactcggaagatccgcactcctaatgacatgttttcccataataactttgagtgtagtaataattctttatgacttccatgtctagaacggattgcatccaaacatactttatatatttttacttttgatagatttatattttctagcttagattccccaaattctcggaaagttgttccttccatttcgtatatatcaaagaacatagatgcataaaaaataagttcatctaggtttagattcttatcaaacaaactttcaacaaacataagaacaagttctattttctctaaagataaatttgttaaaatatatttctcttcagtgtagtccttgttataaatacgaattcccttatatgtatttccatatagccttttaccttttaagaaattttgtacaataggtaaaaaaggattgtacttctccattgccttatgaaatagatcttctatttctcccaaaaacagagggtgcttatctttcaaataattatataaatccccttctattgttcttacctttgaaatatcctcttcagtgtattccagtacatttctttcctcttcatttaattgtgttttaaaaaacacctgacggataacagaaggggttatatgtgcttcttgctgtaattgaattacaaagttatcgtattcatgaatactcattgtttttgcctgttcaggattttcaaaaaaaacactggtatatttcatttgtttattctcctttattctttaatttccgtactatagaaggatttgtttattctttaatccgattctaaatacattcatattcttaacatcaatatcatgaagtaataaaaaagcttcaaacttttcgttaggaaaagaaacaataatttcaacatcaggcaagtgttttaaagatggtataatctttttaatatctttgactttcatatctttatttacatcacaaaacaattgatacacattaaaattatcattttcatttttgataataatgtaacagtttccatttctataaccttttactaaaatatcagattgaataactttcattttaataccccttagaaatttctatacagcgtatttttttatagcttcttctattgttttagcatctttttcttctgaataatctatataagctggtattaccttaccaatatttaataccattagatcaaacctttgatccgtagtttcgttataaaagcaatgggaataatagatagggatctcatacagcatccaaccctttatatcaaaccctttctcttggatataagtaatacagttatgaaaacgaattaatgaatcatcctcatgattttttttattgaagtaactcccctcttcaatttcttcaaaatgagaaatatattcttctatttttatctttatatagatattcaagctatttttcagtaattcttttgcaatttctatcttttccatataggataccccttatgatttaatagtttccttgctcttgttcaaagtcgaatgctctaccgatagattatggaattgttgaaatactgctttcataacatctatgtcttcttgatccacttccaattcttcatcaggcgatacaatttcaccagtttttaaccagcccttatacattgatacaaacatatcaatcgcttcttttgtattttcttgttttaacgtgtcccataattcttcatcaatttgatttataaaatgatctaaattgattgcttttgtttccctatattgattaacaagcacttcttttagtttttctaattcgatttgtgacaactcattaagatcaaaatgatattttagccaatgatatccttcagggatatattgtacaaattttaaaatatcctcttctttagaaaagtcaaatactatataacctttccctttgcaagtaaaacaatttcctttttcctccgctaaatcttgtaataaaccagctaaacactcttgacattcacagtctattttcatagttttcctcccaactttgatacattaaaattaaaactctcgaatcgagagatttaacaagtaaatctctatcttccaaagttctagcttacttactgatacataaattgaatggctaatacaccgatacgatttatcttatttttatcatcccaataaatatttacatcagcgtacttcccattaaaatctttctttattaatttatcaatttcgctataatcatttgatttcgtttcgtaaattgctgtatatactgtatctactccacatcgtacatcttcaggtattttcttatttgcatcttcccaaagttccaattgatatatttcctgtttaacttcttctactgatttttccttttttgtcatagcttctaattgttgatcaaaatactcttttttcacaccatcataacggttaaacacacctaatttttttcttaaatcgttatttattcccgctttttctggtggggctatataaaatttactttgagtttgctttgtggattcttttgatgctgtattatgatttacaaaccaatacaccgaagcacccattactattaaggccatacatatataaataagtaatttacgtttcatatcctaaccgtccccctattccttattaaagaagcttaatggattaaggacttgtccattcattctagtttcaagatgcaagtgtgcccctgtactatctcctgtcgatcctacatgtccaataatctgaccagctattacttttgcatcttttgatacagtaatagaatttaaatgtgcatatctagtttcaaaaccattcccatgatccaaaataactagatttccatatccacccatagtaccagcaaatgtcacagttccatcttttacagcccccacaggttgattcataatattaggcgctgatatatcgactccgttatgtttttctacctttcctgtgattgggtgaactcgttcaggattaaaattagaagttacattttgagtaaatgacaatggaaatactaaccctttttcatttgcggtaacgttttgtaattgtcctagattttgatttattggattaggagtctttactttatatgtgtaagaagcaacccttctaacaacccgatcctctttacttaaaaaatatttctttgtagtagtttcaattatcgctactagggtagggttttgaaatgtatcttgaaacttcagggtattcgctttatatttcactggaaatttggagttagattgatcaagcacttggaattcaaggattttataatctgtcccttcttggaatccagtgttatcttttaaactttctttaaatgtttgttttgcttttatagggtcaaacactagctttccatttgcaagttcatcttttttcaattctaaacttgcatcatgtacagctacctctagatcctcttttaaatacttagagctttttgcgtatgtggcaatattcatattcaaagttaatcccataacagccattaatacgataaataaagttctgataagatctcccacaatatcactcttccttatgtagtccctgtatattcgcttctaacagttctcttaatcttatagggcttagaattatcaatcttaaatacatcaataactgttaatggaggttgaggaatttcaaactcaatataaattttttcccctctagtggttactgtttcagttcccttaatttttatttgatccgctttataatgatggatatttacaagatagtccttcatttctttatataaagctgaatcatatttcccttgtaaacttgctttcttttgagtctcatatatagctaaattaatagtttcatcgacttgggatgcattgagaaataaagctggttgaaaaattgaccaaaggattaatggcatcaataatacatatgaaagaacttgattcatacgcacacccctttcatattttaattatttactattaaaagattgcttggtaaaagttatttgtatacttttctagtaagttcttatactcttgttcttctttttctgtaacttcaccaccctcaccataaatcttggaatacaacattttctccctcttttcttcctcttcagatgggaaaatgttaccttccgcaagctcaatgaattctattaaattctcaatttctttttcatttaaagattgttctagatcagcgcaaatacagaagtaagctaaattccaatgttctactttcaattgaattccacagatcggcaaataattaaaaatctctagtaaatacattctttcctttgtatttaaattgttttttccttttttaatatgttgtttaaggttacgcactacctttgctttgacaacatatcctgtatcttcatatcctgtagaaagttcttctaaatcagccatcccagactgatttctatattcgattacttgttcagcaattgtcatagggatagctaatgcgcacacattttgtctttccactttaaacatatacatcacaccttcttaactcttattattctcaaaataatgttctcaaaaataatgttctcgataaaatgttctcaaaaataatgctctcgataaaatgataatccattgaatattcaatggattatcataaaagtttgctcaatacttatttttaaatttgtagatattaaggcgctactttagtagaagtaatttgtttctgtacttctccacctttagtttgaactgaaggtgttaattgattccatacaacagcaccaattatcacaagtgttgcggcgattaataatatttttgaaattactgattccattttctttttctcctttatgatttgaatttttattttacttttgttccatcaatttgagttttaatttctgttccttttccttgaactgaaggtgttaattgattccatacaacagcaccaattaccacaagtgttgcggcaattaataatatttttgaaattactgattccatgcacattcaccccctttaaatatgactttttcctaaaatatcattaaacatggcaaagatataaataactaaccatgatatgattaacaaacttgttgtagtaaaaatcccaaacattaacgttttgcgttttccactctgttgcatttgtgcttcatagtaagaaaaagcaaatacgctagattcagcattaattgtttctaatgcttgctcttttgaagtttgatccattttaaaaataatatctcctaacgcttttgttccttccccaccaatatcctcataaaacacatctttagctttttcaggatcagatttccataatgaaagaaatctagcaattgtaccgttaatatgttcaaacattggtagagagtccctaataattccatatatattaacttcttgtgaaggatttaatgaatataaatcagcttttaaaacatcaaacaatgtaaatacttctgttattttcttttgatattttaatgttattaaataattaattatcatcgagataattgagtatttaaaaattggctctgtggctagatatatactccaaaccacaagtaggctcattacagaaaattctcctagcgttacatatggaatagctaggtaatagattgccaagaaaagtaatactaccattcttgtaatttgataatgagaagctttaatatacttaatttctgcggttgataatttttgctggaatttcgatttattattaactaaaatgaactttttcttcttttgttggatactttgagcaatttttgttctttgtaattttcgttcttcaatagaagtacatagagcataagtttgatatgctcctattccaaagaatatgagtaccaatagatagacaaacaaacttaccaataaatctatagacacatcttttacactcccatctatttagcaaatgtatttaatatctaaaattagaattatacaatttaggtattcaagaatactttaaggctgtaatagttcctattttagatatcggctctcggtttactcataacaatggctgtaaggactgaaaagattgacattactaaactaatcgtaaatagtattattggtgttttctgttggaaaacataccaaaaatctactactcctgagatcctatacgctaaaaagatcattaaaggaaataagaccattggtgaatatcctaaaattactgtttctaattttcttgttttatcagtttggatatcttgtttccttttctttatatcagcatttaaatccattaaagacatagtgatatcaccacgatctatatgtgctttctttaataattttgcgaaacgtttcgcaaatgttgaatttattgaatatgaaaatacatttactgccctttcaaattctaaattccctctatccttttgaagtgatgataatagtttcatatagatatgctttaattctttattttttgtttcttttacagcatttagcattgtataatatatatcttttgaggtactttgataattttggaataaaacatgatattcgattaagaatgcatactgtgtttttaatcgtaacattgttaatctatatctaattgcaacatacggtaagattccaaaagtaataccaatacctaaagcaaacactagatcatgaatcaaaaagtataaaactgaaacagttattacgaaaacaagcattgatgcaaacaagaaattaaacacatttatttttttactatttttagagatactcgaaagtagtaattctagatgtttaacaaatgggtgtactccgtcattcctttttgctgtttgatgtacttcttcccatcttttaatttctcgtctatttttccatcttctaaagttcttttctaactcaccttgtaagaagggagcacctaataaagcccataaaccataaaagaatagggagtatccaagaatcttagaaattgcttcaataaacaaaatcatgcttattcactcctaaaatataatctcttcttttatagttgtagttattggtgaacgttcacttctttcttgtaataattggataaatctttcagcctttttccgatctacagatttcattttctttatcagtgcttcggaaacttctgaattgtattcccatctttcatccagttcattatatttcattaaatagttgatccaagctttatcgcctttatagtcgtaacaaatttcataaatactcattaatctcttttcattttttggttcatcatttttcataataatgccaagatctaagttttttgctactcgtctaatttcattttctagctttctatttgcgtatgcatcaacaatatgttgtgctaattgttcaggcgttctagacggatcagtaatatgataggtcatcatcattccagttgtccctctttctgcccccttcatagcaccatcggcttcaattccacgtacctcttggaagattatgtaatcatgatctgttcttaaagccgaataaattacatcttcaatatttccattaatggtatacatgtcatatacgagtcgatcaggaaaatctttttttagaaaactttccggacttgtttcaatacaaattgcaatcttttcaggactcctactagcaaatattgtttttaacatagtagattttcctgattcaacatgtccagctataatcatattaagatacagctgtgatatgatttccattagttctacatcttcagaagaaattgtttttcttctcgcttgttcctcaaaagagaagtttttaattataaatcttcgaaaaacaattacagggaataaatttgctggtggacgaataatgttaacccttgttccatccttcatttcgatttcagcccttggattttcatgattaattttcaatcctttatggcctacttccaatgcacgaaaaatctcatagatatgttcctcgtctcgtaattcttcttcttgctttacaaatttaccatttattttgaaccatatttctttaccgatgatagatgctgatactgattcaggatactttttccacttataaaacgctccgaatccataaatttcatggaatagcgcttgagcaagcgaatcaaagaagtcaggatactttacatctagtagattctgttccctaagacacttttcaatttcttttgttaaaatcttttcggcttcatgatcacctaaaattgcattatgctctatttcttgcctttttatcttttcatcggaactaatacctctgtcttcatatatattttctatactttttttgacgatttctagtacctctgagaattcatgcgtttgttttacacttttggctttttccacagtgtaattaataacgtctgccactccacgttcctgtaaatgggagtttatatcaaataatttcggtgttactgttgacatttattttacctccttcctttttttacaggatgccaaaaaatttccttcttcttggcaattgaagttcatcattaaaaattaaatcaacactggatgcgattgacttagcaacagcattaattgactgtttgtatccgatatcttcataatcataaagtacagttcgttcaatctcagaaagcataccattttcacttttttctattgttgttaataatggaatatcaatatctttatggatatcttttgtagtaggcaaatgcgataagtcttcgaactgattaataatcattaacagatcctctttttcataaccaagtggatataaaatatcacgatgaaattgattaaattttcttattgcctttgtttgttggttcataattaaaaatcgtaaattactctcatttaatgcttgaaccatatttgcattatcaaaatgcgatccagcatcaactaagactacatcaaatgtctgtttagagtgttcaattaaatagttaatttcttctttagtaaataatctttccattttagtatcacgattaccacctaatatatataggttgggattaaccatatggaattgtgacagaaattcctgttcagaactaatggttttagatgctaacttacttttaacctgatccatataatttcctttaaaatttagttgatcagtcccactatcccatgcattcagtaataaaactcctacttttgcatttgtatattggcttaacgcttttcctacgcttaaacaggttgaagtagtacctatgttagaaactgaagagaagaaagttatgatattagttttctgtaccattgctagattaagattttgatcaataaaatcaacaatttgttctactactaatctaggtggaattaaataaatatccttactattacaaattgcttttactgtactttcaagttgaggtttgtattgattctctaacatgtaaaatacctttttattttcaaactctatagtagataattcactataaggtaatacacgatctgaaattaataaatatccatctttactagacttttcaacatcattaatctgttgtaccgaagtaaaaacttttcgttctttaattttattaattagcgcttcatcggaagacattacaaataatttcatatttgcataacccctttcttgttatctcccaaacttatagacaacataaattttgtatccttgacttgtataatcttttaatttattcaacattttttgatcagctataacttcaatattagatactgagcctgtagcattctgctgatcttcttgtgtttccgttacctctttatttccgttatcttttactgaagctactcgaacattctgtaaaatcggtttggctaacctcataacttctacatctgagtcttcatcagtttttaatggctctttatcatttttcccttcatttcccttagaatcttgaacaagggaacgaattacagcttgatctttatcaggcacaagataaaagtctgcaatgtatgtttttcgtaatgatcccggaaccgcaaacaaccaactatcaggaatcggagcaataaattctcccttttcctcatttggaattagattatatgtatccactaatttggaataaatttgagttccttttttaatatcaattgaagcatgtttatttaaaagaagttgtacatcttcaggttttaacgcatcatgtacagctatatcttttcttacagaaactacttttatgtcatctttagtaatttccgatttgaatttgatatcttgctttgcaacaattacatcagttgtattaattttgtctttaaaaactagttcataagatcccactgtaccaattcctaataccatcattgaaacaggtaatagtacctttaatttccttttcaacttcatttcttcttccccttcttaaaatattttaggtatgaatctagaccttttcttcacaccattattaggtaattcataaaattgacgaggtaatatttgtactagaacgggttttagcactttttcgattttcattttatattgctcattatcatataagaattcagatttccacgttaactctattaaatcctcataaggaattgtcggaaaaagaactaacggtttcttatctccaagagattcaagccatgtagtagtatcaatcttttttgtatatttcatatttataaattgataagttactccctctgtttcctcaatctcatttaggaaatcaatagcccttttttcttccctttgtacctcagcatcaattccaccgttcttaatggttgatagccaatctattttgattggatcaggctctatgcaaatataaatatgatcagcatggtgtaataaactttgtactgttggatcattcaaacgattcgaaacatctacaatagtaattgtcgagttaatcgaataaacaaatttcagcatttcttcgtatccaaatgactctataggctctaaacgtgaatctattacataccaatccacaccatgttcattccatacagctccatgctttttaaatgatctattcataagaagttctcttgctacatctacatattcctgttccttttcttgttctttaacaggaatagccaagtaatcaaaggtgtaaggttttagaactggatactcaacataagatacttttaatcctcgtccagctattgctttagctaaattatgtgcaaatgttgtagaaccagccccagaccacatagagcctactacaattagttgattaggaatagatgtataagatgttttaaatacttctttttctacaaccttttcttgataaattatcttttcctttttttcaacaggtggtttagtagctattacacttgcattcacttctttgatttgtaaaggatcttcttcactgggttgtagggaaaagaagtttaatatttgttcaataactagttcaaaatcggattcaaaaacagtaaattcaatgtcatttctgtttaaaaaatcacatatagattttgaatcaatcacttttgaatctacaacaatataatctaccttccaaaattcaactacatcctctacatcagttaccgtctgtacattcttttgatatatttcaacctcctttccatattcatgattctctaaaattgcgactaatctctcaaaagcaaaattggacttcatcgagatcgctaatttcataattccacctactcttttgtgtattttattcacaaaatttataacaaaagtcctttctaaaaaaaggactatgtttatttaatcaacgttctttcatcacaagaaaattgtaccatcttgtgtttaattaaacaacaatttttgtgtattttttaaacaaaaatgtttaaatatccgaattagagcatattttaatattagaaaagcttactattacgatagtaagcctttccattaatcttatgataattctcataaactactttattatctctctaattctagctcttcctctttttctttttccttcggcttatcttccagcccttttaaagaattgaattcattttgagcttgtttttcgctagagtaaaattctgtaactctttcaacgccattatatttgtctaacttccctacataccaaccgtccttagaatttattacttttaaatcctcgcttttttctttttcggcaacataaacattattagtaatttcttctcttaatccattatttcttggtagatttttagttttattaaatgcataatcaactaattcatccatagtttgaatttctttattttttaataatgtccagcctattacattcccactattttctgaaaggagtatttctttttggctaccataggataaatattgtcctacatgaaaattggtatctattttaatatcatttagccttttatctatatcatttctaatatcttgaactttttcttcaagattttcatttaattgttctttcatgtattgctttaaaacggtttctttgtgtaaagattgagagattgctattctcaacaattgattttgtgcatcttttctatttgtatattccttagatacaatgtctgttccacccatacttgcaacagcatacttaccctcagatatcttgtgtacttccagcaaggattcaacatgcttaaattgagatgcttctactagtttattattagtaatttctttatttaataaatggtaatctccttgtttatgaacttcagataatggaataatcatatttttattggttctcaaatagaatttatcatttttaggtgaatgctctaatctagctgatagaataatattgttttgtttgttaagtaattcaaattgattagtatttaggttttctttattacttagttttaatcctaaatctttttcaaagaactctacagcttcataatattgtttatcgttattttgatagaaatctagaattttgtctttttgtagttcatcaagagtagaaattatatctcttgaaacctcctgaatctcacgaattgcatttttagctaagtttagatctttcgcccatgtagctatatatcctaaagaaaaatcatccctttctagtccataattactagaaactacataagcaacactttccgcttgcgcttccttatgtcctctcggaaggtctttcatttcactttctttatgatgtaacttcgcatgtgcatattcatgtagtaaagtagcaaatttgtcatttgtatttttattttcgtttgtacttattacaatttcatttgtgttcctgttataatatcccccaactccttgatcagtaacactctccttaatatcatatggcgttgtttccttcacatgtttaaagaaatctttatataaattatccattgattggttatctgacaaactatttttaataaaatcacgcactttaggaatttctttacctacagtttgggaaacatcaaacacgcttaccattttataaccaacggttctttctacagtttcagtttgaactttaccattcttatctagcataggttcttttgtcacaggatctactttttcaacttttattttttgcttttgtggagcaaggatacggatacttttctcatattgtttcggacttctcccaatcttcttccaatcattaaagccttgcaccatagtagcatgtggcttttgagcaataattaatattgtattattagttgaataacctttaaattgcgacattacttttagtaaatgctgaaaacgatcatttttaaaaatttcttcaaggcctttttctaattttttattggtatcttcaactgttataaagttttgcatccttctcacactcttttcacatatactggtttaaagaattctttatcaaatttattaatgcttacataaccatcaagcacataatcattaatatcctcattcaaatgaattatttcttcataatcaaaatgttgttccccttgtttctcataaattgatttatctgtccctaaaatctcatgtttttctaacatctttagtcctcctatttacattgaaattcaaataaaactttcccatcattaaaaacaagtacactagcaaattcttttttgcctttaaaaccttttatcttactagttttccctttttcacataaggattttatctgtgtctttgtaagtttctttcctgatttctctttaggaaatgtttgcttacaaccttctttataattggtacaaccataaaatttttctttttctacaatgtgtccctttttacaagtaggacaaagggctaaataatcctgagaagctatttgttctacctgttccgacatatccatttcctctagttgttctttcgtggttgtaactaaatgttgtacaaaccgttctgtattggcaataaagttttcttttgtgccttcattttttcctattctctttaaatatttttcccaacccgctgttaattttggattagctaacattgtcccttccactaaatcacataaaatcgctccttttttagtaacatacgtccggttatttttaatttctatatactcttgtttttttaaattttcaatgatattaccccttgtactttcttgacctaatccttctgtctctttcaaagcatttttttcttcttgatctaatttgtctaacactttacttccaccacaggttttcatgagtataataagctcaccttcagtgtatcttttaggaacttttgtcttcccttcttttgttttcaaaacaaccgcacaattatcaccacgattaagtttgggtaaacttcctctttcatcctcttctttactatcttcatgatctgtagtgaataagactttccatcccttactcacttccaccttccctactttttcaaactttaaattttgaaggttcaaatcaattttcgtttcctcataaatataaggatgatggaacattcctagtacgctatgaacaatttcaaaatagatatttttttgcttgtccgttaattgacttatttgtttttctgttgggattttttcagtcagtacaatagcataatgctcctgtacttttttattatttacatatctagaattgggttctaatgaatatggttcaaaatctacaccagcaattttttgatattcttttaaatgttctttcaaatactcaaactcgttttctgtaatatatggcgtatctgttcttggatacgtaactagggttaacggtttatcatacaacgattgaaccgtttctaaaacttccttagggctatatttgtattttttatttattagagcctgtaagctcgataaagaatgtaatttcggtgaagatacctttttcacttccgttttcacttcttctacaatcgctgtatttttcgaatgcaaagatatgttatgctcttttagtttttcttttaacaggtactcagaatcaaatttttctttgtatttggcacaaaaactttgattatctttttcaaaacacccctctatttcatagaaagaagtcggtttaaaattggtaatttccttttcacgctcataaattaaatttaacgttggtgtttgaacccttccaactgtaaacgtgcctttaatcccttttttttgaagcaatccactatataaacgtgtgccatttagtccgactaaccaatctgaaacttgtctcgcctgcgcttcatggtaatagctcacaaattgattagcatcttttaaattttcgaatccttttctaacttctttttcaactaaactattaatccataatcttcttaaaggcttctctccgcctcctgccaagcgaattatactataagcaatgttttccccttctcgatccgaatcggtcgctataaccacatctgaagcgtctttcattagttttttaatagtattgaactgttctaccttattatttgataccttaaacttaaattctgaaggaataattggaagatcttttaaattccaatattttaatttttcatcgtaatctacaggatcataaagtgttactaaatgaccgatagcccacgttaaaattgctgaattcggaaacaaaggacaagctggaatttctatatatcctttctttcttttggtattcatgaatacttcctcgtaggcttcagcctgattttgcttctccgctaagattaaagtatatcccatttataattcattctcctttatcctaaattctatatgatataagtcttgttagactgttcataacatcaaaatccaaaatttaaagcttactttcaattttataagacgagtatgcacaattttgcaaactattatccatctcaaataaatgtccgtatttttcgataatcgagaagaattcttttttactgataggttgaggttctacaaatacttctcccacatcttttgtataatcaacaacttcataattgtcgccaatggcatcatgagggtagaaactaaactcttttgttttaggatcatacgctaccctcaacaattcagataaatacttttcttccccatcaactaaaatcatatgttcagggcaagagatatccccatcaaataccttcccaaaacgaatccatattgaaacagatgaaataatctctcctgtttcttccaaaataattctgtcttttgctaacaagactttatcgtactctaattgatatttcattttcatcttcctttcttatttgaacattttttcaaagcatcagttttgtttataattttacataaacaacaaaaccaataattagccaaaatggaataactaaaatcaatgcatttatacaaccttcaataaaagcaaatggtttctcttcaatctttataacttgttccactactatttccccctcataaaatcatctttcccctcacttcatacccctattaaaataattaaggcaattagggtatttaagatatttttaaaagctatttcttattggactaaaaagtttaactcttcatcaatatctttttcaatgtcttttatgtcctgtgaaagtaacttttcaatatcatcaatattgttagccaattcaacgttcttggctatttcagttttattgtcctccatactttgcataccctgtttaatttttataacggattcgatgctttcacttgaaaaatcagcattttccataattgtttcaagttctacactataatctacatattcccgttcttcttcaaaaagtgtcatattaatagactcaatcttttctctcggtagatattcgtttaatgtaaatttaccatccaagtaatctctagccaatttttctatcgactgaggtgtatttatatcatcattcaaattatcagcttcattttcctcatgaatattcaactcaacttcttcttttttatccatttgcggttcaggttcttgaacgatcttctctttttgtaaattaactttcacatctttttctaactcattatcagttagttcctcaactttcttatcattatgattaaatagcgaacgatatctttctctatattcatcataatttttcaagaaatctttatagataacaaattgccatgcctttttcaatttcaaagggtaatatccagaaataaacacataacaatcttgcttatctatgtttattaattctccttcagtaattaaaggtcgttttacatattgctcttgtactgacttagaacttgaagacttcccactaaacatccctgacggactacttaatgattcggatgtcatacgaactgtagtctcaccagctaaattagagtaatattttgctgtctcaggatctttggttcttaggaatagcgtaaagtcatggttattaataatagttcgtgctacttcctttccatataaattttctaattgtgcattatcttgaataattgtaatcatactcatgcctaacccacgacaagtagataaaaccctaccatacttctctatctttccaatattcgcaaattcatctaacaaaaagatggatggaataggtagtttagaatcattacgatcagcaatatcataaaatacagttatcaattgatcgaaaaaagttgctgttaatggcgtgaacggattttcatccatacgaatttttatatacaatatacttttctctttttgaaattccctaaaattaaaatcactatgcgtagtcattcttgcaactttttgtagtgaaaatatacctgtttgttgcgcaaaagaagacaatatacttgtccttgttttaccttcagcaatgctggcatctttcaacaaattgtatgctgggtgatcttctccaattgcgtcacacaattctctcaaataattttcatcatctgatacacgataaaattccctcttaacatcttttggtaaattcgcattaggattttcactcttacaatagataattaatccagctagtaaatctttggccgtattaaagaaataatcctctttatcatctttcttagagttttttgatattgttttagctaattgtaatgcctcttgatcgtctttcacgtaatccagcggattatacgcattagactcaaaatttataaaatcaatttgatatactttataaccttgatcttcttttattttatgagttaaattatacaactcacctttaggatctgtacaaataatggttctctctctattgtttattaaattatttatcgcaaaagcttgacctttccctgatcctgaagatcccacgacatttacattttgattatctaccgtagtttcatcatgaacaatgattaacttctttgttttaatatctctacctagaattatcccattttcagcctttaaagttttaaaagggtctttttcggagtatttactgtctttagcaattgctcctcctttaagtaactctagaattgttccccatcttgaagtaccatgaaccccgaaatcactagcatcctcatattccttatttttcaatcccattttagaaatcacaaagcccattgatataactaatactacaagatataaaatttgcatttgcttatcagttgttttcatgaactgaattgtgccctcataatcctttaaattatcctgaagattattgtgttccttcagcactctaagtaatccagcatagaaatatccaagtataccgcctatagttaaaccacataaaatttgaacaaatttatttcttccttttcctttcatcttcactctcctataattcatgacctccaagataattttttctagcttttttcttcatttttcgttttctttctaaatcattatctttggtttcttgactttgagccatttgaattagagtgttaaataattgccctgaatcacttgcgacattattattcgtttgttcttcaaattcatgttttcctcttggctcaaatccttttctatctgaaggtctgtaatgattttgttcataagacttatcattatatttcttttgctttagtagtaataaatcttcagataatatacctgtactttctcctgttaaatgtagaagtagtaattggctttgaacctttggagggattaccttaattgttacatcatcaatatttggatagtaaattttcatcatattaaatagtttttcttttaaggcttcttttctactttccttatcagcaatttgttcactaattgctgtaaatttaattgatgaatcatatactttttccgcattaaaattatcaaatgtgtgtttataatccttctgaattttagtcttagttctttctaaaattagcaagtccttatttacactatcccattcattcaatacatcttttaaattatgatgttcatcattcaaataaggattatccctattaaaatcaggaagcgattcatggattatagtattctctctaaattgttgcgtgtatgaaaacttaatatcataaagatccacattagatccatcgaattcttgtgcatactcaggatataaaaacttaaattcctctttagtaaattccttttgaagttcataggctcttaaagattcatcatatatcgtttcaaaataagaaattgttcgatttaattcatcttttttactatctaactcattagttctttccaataataaatcttcaaatttatttggaatgaatccataagctagaacacttttaggattcttttcaaaggataatttggcttttgataaaaccttttcttcagcatcaatttgtagttttttataatcaatttttttcttccaattatctaatttttttagattctcttttgcactctgataatcaaggaaaccaccgacacgtccagctacttttttaagtacttcccaatcaaactctgataaatccattgatctacgaatctgattaaattcatttaacttttcattctcaaatttttgacgataatcagataacgaaactactttttgttcaataatttctatctttttattggcaacttcaatctctttatttatctgagcataatgtgaagatggctgatattctttaccttctttttttgaaatttccttttgcctttcctcaaattgatattcttctcttgtaagtctcaatcgagggattttatttaggccttgcttttcataactttcatgagaaatccgttcaggaatattcatttttttataccattcattcactttttcagcataagattcacgccattttaacaatgtttctttatcattccaattaacagaatgtatccattttccatcttcattttttattctttttttcccccaactcccatcttcgttgaaaggtctaactgtcaacataatgtgcgcatgtggattatgttcacgatctctatgtatagatatatcagctaccattccatcacttactaacatcccattaacatattcttttagcatttctttttgttgttcattagtaagttcaacaggtagtgcaactaaaagttctcgtgataatctactattccagttcctctcaaccttttcaacttcattccataacttttcacgatcataagcccattttggagcatgtttaggagcaagaataaaagaatcgggttttacttctctacctctataagacttaaattccatatctctctcagaatataacttctcaccactacgatatgaagccgaagcaacagcggattgactagacttattaatattcctcacattgaaataaaacagactcattttgattcttcctcctttcatttcccccgtagggctattgtcgccagacaacgtttgaatcataactttggaaaagttttgattacccatgaaacagttaggaaactgactgtgtaaatgggcactcgtttctcttcgtgatcattataccacttcgtttttcccccaacaagtttcatagtggtcttatatttagatttctcttttattctctatttcttttctatataattcaaataggaggtgtaatcatggtaaagttacgtacagacgagaaactaaatgatattgaagaacaaataaaaaaactccaacaaaaaaagaaaaacctagaaaaacaaaagaatacaaacgttggaaaacacttatttgagtcttgggaaatagaagacgaacaaacagcaatcactttgatcaatatacttaaagaacaagcaaaagaaaaattaagaaatatttcactaaacggtgaaggttctaatggaaactaaggatgatcaattaaagaaaattgatcagaaaattaaagatttaaaaaagttacatcatgatacaaaaaaatctattgagagaaaaaaatcacaaaacctcagaaaagagagagctagacgtttaattgagacaggcgctttagctgaaaaatattttgaaattaccaatcttgatatttctgagcgtgaagatcttttcaaaatcttttctagtttcataaaagctaataaaccgaatcattttaaaaaataaagacacctctttttaaaagaggtgtctttatcaataccacaaagtattcatgaatactttgtggtattaaagaaaaatatttctaattttatcagagttctaattcattttcttcttctctttctttctcattttctttattattttcttcttttgattcatatggtttttcatatttttttccccaattcgtttcacctgtttccgcaaattctaggaatttattgtccatattcttggtacttgcgttcatgtgacggaattgcggattttcttcttctaattcattctgatttttacttcctttgctcaatgtataaacttctttgataccttctaaatttttcatgttatttttttcatggtctttaaaagattcagggataagtctatatttatcttgattaaataaagttttgattcctccatcaatttcttttccatttgagtcttttagactaaatacttttttatcattgtcatactcactattagataaatcaatttttaatttttcttttttatttgtttccacattaaaaacaacaatattcatttctttatctttttcaggattccatcctaaagcaaccattttaggtagcatttctttttgtgaagcctgaatttttttatcgaatgaattgtatttttcaaattcactccaatattcattttctttcttctctaaatatacatatgggcttccatgtttctgataaaactgagaatcttctttgtagatctttaacatttcatctgaaattgaattttgtttcttctcttcttttacctcttcaatttcatcaactttaatatcttttccttttcgctttaaatcttccatttctttctgttgttctattagatctttctcaattttatttactgattctaatgttttatttgttttttcatgattcatattcatttcttttcttaatttttgtatttcctcaataacttcgttattagtttctttaaattcttcagattgcatttttatattctcatctaaatattttaaaattacttgttttgctatttcaggatttttttctaaatactcatatactttttttgttttaccattcaattcttctttattaatactttccaatgcttttttatcaatatctttttctttttcttttccttctttatctttatctttatctttatcgttatctttctcttctttcccttccggatcacgttttatttttgataactctcttttcttaaaaatcgctttccatattctactcattagttcatacattgcttcactaaaatcatctcttgtttgttcagcattattcatagcttatttcctcctttttctatacaattatcaattaatttgatatacatttatagtataataaaaaaaaattaaaaacatataaaagcaaaataaatttaatataatatttttaaaaggtggctgaatttttttgaaacaaaatttagatattccattgcaaagaaccgacaaaaataaaattatggaaattaaaaaatcatccaaaagaagttatcttgaacaactacaaggaatttttaattactatgaaaaaatttctgtagaattatttgccgataaagttataaataattacgatcaacttaatgatttaaagaaagatttagttacaataacaattaaaaatgaattattcacacaagaagagtattttagaaagattcacaaagcaattcttactaaattacctcaactagagtttaaagaaatgctaataatcatgattgctcaatacatgaaagataaagaagatccagcttcactattttaaaaacaccattttaaataggctgataagcctattacacttcttttaaaccctcgtgaaaaaagagaagcatctacatatagtagatacttctcttttttcacgccttttaaaggctctcacaagacaattactccatttaaatacttaccccttaccaaaatatccaactcacgcccacgcctcttttaaccccttaaaacaaaaatacaattctcccttagataaatgtgctccaagtcaaaaaagacaacacctcaaaaacaaaacaaattctttttgaattcattaatggaatctttattacaaaaaataaataaacctaaaatgaactttatataaatccataataaattctaaataaatttattatgagtttctttttgattctctttctgaataaaataattgaaattcaaaagtatatctaaaaagaattcattttaaatcttttttacaccttatttctaaaaaggtctaccgcccacaaaaagaattcaaaatgaattcaaaaaagagttgttttatattttattttgttgtataattaactcaaggatgatttaaacaaccaaataaactatgaggtgaataacatgtcaaatgctaatgaaacacaagaattagaaacacgaactaagaattacgaaatggattcctctttcgatattggaaatgcaagcatcaaagctaagatcaatggagaaaaattaaaacaaccttctgtaattcaatatttattagagcaaccgcctgttactgaaacaaacttaacaaaacttgtcgctaatttagatgatgatttaacagtacatataactagtaatggcattaagcgtaatggcttatataacattggaaaaagtgcaactctaacttctgattcaaacgttgaaaatatgaatataagattagggaaaaaacacaaacatacaatccctgttgctatgacattgggtatgatggcttgtgaagctgtcaaaaacgcatttacagaagacggagttctcccttctacaattaatatcaaatctaatttaagttcagcaattcctatgagtgaatatacagttgataaagctgagtttttagagagacgattcgctgaaaatacacatgtagttgtagtttacgtaggtaagcttactgttactgtttttattacattcgaaagtgtaaaagtgactaaagaaggtgtaccatcactttatgctttaattgaagcggattccgatattctcaataaatacaatgaacaataccaagaaaacgccaaacctaaagattttgtaaacaaaaaaatcttgcacgctgatattggtgacggtacaacagaatatgtttacacacaaggcttaaatcctattccaaaaaactgtacaggtgaacgtcgtggggttggacatgctactgaagatgctatcaagctattaaaagaagatacaaacggacgtgttcttttaaatcgccaacaatacatgaatatcctaaatgatcctactcaccgtttgtatcaagatgcatctagatttttagaaaacagcaaatacattcaagctaaaaaaatactagaagatattgaagaaaagtacacagaaaaaatagccggtgatgccgatttcatttgtgtatacggtggtggaagtatagaatttgaagctttactttatgaagatttactagagttttgtgaagaggtaaattgtaagttattatggattccaaaagaatatgctgttgatatgaacatggaagggctatccatattaaacaaaaaaatcttttttaaaaaggggtgaataaacagtgtcaagagccaacgttagttggaagataaaagatattaaagatgaagaagcaagaaacaaaataaataagtggtgtgatcagcaagagaaaatacaagtttcattaacgagcttagtacttcatatgatagaccgtttcggctataaaaatattaccgatcacgatattcaaaaattactacatcaagagtttcctctcacaagtattacaaaagaggtaagcatttctgaacctatagaaaaaatagaggaaacacctgataatatatctaagcaaacaaataatataactacttcccctaaaaccattgaggaagcaaaaaagaaccctgtccctaaagaggtacagagttctagtgaagatgatttatatgctcaggttgataagaacgctttttaaaagcgttcttatcaaccaccaatacccttttaggcttttttcaccactatcagtaaaaaaacaatcccatatttcaacaaaatatgatatactcgttagcaaagatatgatttctaatttgtatctttgctattttttgtaaaaaaacaacatataaagatgtaaaaaatataaaaaaatataaaaaaagaaggagcaccgacaaccgccaagtaatcgaactcctctctaattcctattattattaatttaattataatcttctacattttgtttgtcaatgttatattggcttatataaagatgcaataagattgtaattttccccaattagagagttcgatgttaaaagtgcccttctatgtaaataggaggttttttatatgtctgaaacacaactagtaggccaaacgcctacctttattactcagggacatgtcccaaaagaagaattaagactaccaaaccaacattttataaccgcaatggattggatagataaattaggagaatccgcttactgtgattatttaaaaatgtatacaatggctgatcgtagagataaagatagagaatatgatagagttccaagagcgctttctagtttatgggaagctttagaccgtaaagaaaagtattttcgtcaaaagatacttattccattatgggaatatggcttagttgatttagtagaatatcaaggagaacatgcaagagctggacataagcctatgaatatagttatttatcgttacccttgtaatgacattactcttttaacaaagcctttagaaaaagtacgtgactggaaaaaagactataaatcatcaggaaagttctatgctataaagggtggaagacctaaaaacgaactaaaggattctccacagaatcctttagtaaaggattctctacagaaacctttaaaggattctccacagaatcctattaataatactaaagaacttaataatttattaaattattttagtaagtatgtaagtatagatctatctcctatcgacttttttaaatttgctattgtaagttcaccatcaaaatatgtagagattgaattaaataatttaactactacatatggaaaagatatagtgaatgaagcaattaaaagaatcagtgacatgaagactgataaatacatagctactataaaaggtattatcaagaaatgggtatcgcaaggaatgaaatctttttctgatattgaaaatgttgagcaagcgtatcttgaagaaagaaaacaattacagaaaccaaagtctcaacaaaaaccaaactctcttaaaccatcatacggaaagaaagatattgttcctgagtggcttaaagaacaaaaacttaaagatgaagaagtacaaactaataaagagttgcatcaaaacagtgagagcatacaagtgactactgaaactattaaagaaaagattcgtttttatgaaaaaaagctaaataaatatattacagaagacattacagaagacaattggaaagtagctaagatctacttagatgcaaaatgggattggacagaaataggcatattatttaaagaaattgatgaaatgaagaatgcgattcaataaaataaagtgttaaattcaaaatgaattcctttggattgttaatttaaattcagttagaattcattttggatttcttttaaacctcttgtcattttaaatagaaatatagtgtatagaaaaatgcttttcccttactattttgtggaagcattgggtgggggttcggtgggctaagcccccgagaacttccgtattttattatcgaataaaatattatttatgaacgttaaactagcgattcgacagggtatactagttaatccaagctgtgatgatcatcaccccctattttgttatcagcttggtgatagctgataacccagtcgaaaaaaatttgtaaagagtaaggtgtggagattttttgaatggtttctcaaaaaatactacccgttctttacaagatttttagctttatatgttaagagggattttttgagtaggatctacataaaaggatttctccagtggcgtgtcaagggaatagcacaaatgtttttagagttgatgttgagttgggattttacaagttccacaatttgctataatgctaatgcgaattgtggaacgccataaaagcataaacgaaacacagcgattaaaaatattttgcccctttacacgccacttcttcgggggtatatagcccttctttggaataagaaaggtatacaacaggcatagaagattttgaactcaatctatgccttgtgtatattaaatataggtagttagtttattagtttcgttgttttatctttaaattcttgttcatagacaacaatattgtatttatcacaatttttatcattccatgaattgaaataataactatcatttgtttccataatgtctagagtatcatgttgccctttaaagtcttctagagtaaggctattatcttctagatatgtttttgcttctcttttagcaaatattatcgcattattgatatctttgaataaatagactttgcttcctgttccgtcattataaaaatcatattctactagaactactattgggatacacatataaaattcctccatgataataattttttataaattatctattgtgggtcataaggtttgagaattttgtttttagatatattaataatttattaattaatgagttactgtaagtttggttattaatctttttagctattgttctatctattgaaatatctgatgctatttcatcaatacatctactaaaagcatttagattaataattgtattatgaaaagtatcatctacctcacattcataactaagttccagtaaaattgtttgaaatttatgcaataattcttcttgtccttgtttcatgttaactactccctcgtatagtatgtttaaacttaatttttttactttcatgagagacctgtaaaaaataaagtattgttgtccttattcccccttttcggggggatgggcaaaaacaccctactcctaaattccaatcacttacaaaaatcctggataataaaaaatggacaaagctacgaaagttagcacaagagaaagaggtaacgccttccgctctactttgtacaatatatggtgatgtgttggcatattggagtaatcaacgtcgattagcaattaacttgactgtatttaaccgttatcctgttcatgatgaagtagaacagattgttggagatttcacatcacttattttattggatgttgatgtaaaaccagagcaaactttctttactagagtaaaagaaacgcaagctactttattagatggccttgaacatcgtcattacgatggagttaactttattcgagattttactcgatatcatcagatgacgccaaaagcagttatgccaatcgttttcacctcgatgttagcaggtgcaggtgctttctcttgggaacaacttggttctcttcgctatattcatgctcggactccacaagtgtatttggataatgtagtaattgaaaaaaatggagagttattaattagctggaactatgttgaagagttgtttgatgttgatgtaatagaagcaatgttttcccaatttgttgacttattggaacaattggtgaaacaaagcgatataacatctttgcatatgaaagaatcggatcaaactctaattaagcaatacaatgaaacaacagaaaaaataccttcaactactctgtatcaattatttacagaccaagtaaaacgtacgccggatgaagtagcagtggtatttgaacaagaatggttaacatactcggaacttcataaacgttctaatcaaattgcccacttcttaaaagagcaaggtattggtctaggtgacaaagtgggtcttttagcaaaaaggcgagttgacacaattgttaatatgttaggtattttaaaatcaggtgccgcttatgttccgattgatcccgatcatcctttagatcgccaaacatatattttaaaaaatagctcatgcaagcttttattagaacctagtctttatgaagaaaatcatttgtcattttatacaacagaagatatgcccgctattgctggtccagaagatattgcctatattatatacacttcaggaagtacaggaaaaccaaaaggagtaattattacttaccaagcggttacaaatactattcaagacataaatcaaaaatatgaggtgaatgaagatgatcgtattattggtatctcttccatgtgttttgacctatctgtatacgatattttcggagctttaagcacaggtgcaatgttagtaatgattcgtgatccgagagacatgcaagaattaatccgcactgtcgaacgtagagggattacaatttggaatacagtgcctgcaatcatggatttggcattggagcaagtaggttctcattttgaatatccttctttacgtttagttttacatagtggagattggattccgctttctttaccagaaaaaataaaacgacattttccgattgcagaagtagtctcactaggaggggcaacagaagcatcgatttggtcaatttattatccgatcaaacaggtggcatcacattggaatagtattccatacgggatgcccttggcaaaccaaacgtattatgtgttgaactatgaaaagaaaatgtgccctgttggtgtaattggagatttatatatcgggggagtgggccttgctaaaggatatgtaaatgataaaaagaaaacaaatgaagcgtttgtgtcacatcctgattttggtcttatatataaaacaggagattgtggaaaaatgcattctgagggatatattgaatttttaggccgccaagattaccaagtgaaaattcagggatatcgagtagagttagaagaaatctctcattgtcttctaacttataaacaagtcgaacatgctgtcgtaattgatcaaacagatgagaacggaataaaatttttagttgcatatgtggtaactgagcaaaatattagtacaacagaactacgaaagcatttgcgagatcacttgccagattatatgattccttcttattttgtttatttggaccaattacccctgactccaaacgggaaattagatagaaaagcgctccctactccggagaaacaaaaaaataaagtatttattgccccaaaaactgaaatggaaaaaatattaactagtatttggcaagaagtactcaaaatagatcaagttggagtaaatgatcatttcttcgccttaggtggagattcgataaaagcgattcaagtgtccgtcagactgtatcgacaaggattcgagcttgaaccaaaaaatatattttcatttcctatattaagggacatggttcaatttgttaaaaagctagaccagttttcaagttcacaaacaaatgatgtaaacataatgaacgataataaagctacattactaaatgttaaagataaacaacttaatcaacatacacttaacaaaatacaagaaaaaatgccggatataaaaatagaacgtatttacccgttagcacctttccaggaagttatttatgagcatgctacgaatgaacctgatacaaatgcatattttgaacaaacaatttgggcacttgagggggagctggatattaaactctttattcagtgtttccaacaattagttgatcgtcatgattctttaagaacaataattgtgcaagatgaacaagcaaaaccttggcaagctgttctatatgatgttcaaataaattcagaaataaaaaacttgattgagatgacgaaacaagaacagcaagaattcctaaaacagtggatgaatgaaaatttaagtcgaggatttaaaaatgatgaacttatgacacgtctctgtatattccaactaggtaataacgagcataaagtaatttggagttcccatcatctattatgtgatggttggagcgtcagcattttgatagacgaattattccagctctacgaaactacaaatgccggaactacggcggggttacccatggtaaaaccttttgaaacatttatagattggactttggcacaagatcatgagaaagcacgtcatttttggcgagattatttatcaggatacaatcagaaaattagtattcctaaaaagaaagtcccatctaaaagtgaagggttaaacttcacttttatggatttaacattagacaaggatttgactgatcagttacagacatttgtaactaaaaataatataactatgaatacggcattactagctgtatggggaatattgcttggcaaattcaacggaacgagagaagtagtattgcctaatctagtatcagtcagacctcccgaagtagaaggaattgaaaatatgttcggtctgttcacaaatgttttgcctatccgattagcatggacagaaacgcaatcttttgtggacttcctgcaaaaggtacaactagagacattgaaatgtaatgagtatgcatactattcatttgttgatatacaaaagcaaagtgaattaaaaactgagttgactgaccatctttgggtttttgaaaactatccaactaatccagcaatcttttcttcaaatgaaaacagacattttgctatcacggattacgaagttgttgatgagccacatgtaaagtatggaattatgtgcttccctgaagaaagacttacaataaagtttggatatgatcaaacggtatatgaagcagagaaaatacaggaaatattaaatcacatccatgggttaatcaacacgattcttcaaaatccaatacaaacaatttgtgattacaaattataaaaaatgaaaaggcgagcaagaactcgcctttttaaatagaataggagtaaatcaaatgacaaaaaaattacagttatcagccgaagaaatgcgtcagttaggatatcaagcggttgacttgattgttgatcatatgaatcatttaaaaagtaaaccagtttcagaaacgattgatagtaatatttttagagacaagctaattgaaacgattccggaaaacggatctaatccaaaagaattacttcattttcttaataacaatgtgtttaatcaaattactcatgtggatcatcctcattttatggcttttgtgccaggtcctaataattatgttggtgtattagcagattttttagcaagtgggtttaatgtatttcctacagcttggatagtaggtgcaggtgccgaacaaattgaattaacgacaattaactggttaaaatcaatgctaggattccctgattcagctgaaggactatttgtcagtggtggttccatggctaatttgactgcacttactgtagcgagacaggtcaagctgaataatgacatagaaaatgcgattgtttatttttctaaccaaactcatttttctgtagatcgagcacttaaagtattaggttttaaacagcatcaaatttgccgaattgagacagatgaagacttaaaaatttcagttagtactttaagaaaacaaataaaagaagatcgattaaaagggaaaaaaccattctgtgttattgctaatgcagggacaacgaattgcggagcggtggactccctcgatgaattggctgatgtatgtggtgatgaagatatatggctacacgtggatggggcttatggggctgcagcaattctcagtgaaaaaggaagggagttattaagtggaattcatcgtgccgattctttaacgttagacccgcataaatggctttttcagccttatgatgttggttgtgtacttattcgaaatagccaatatttaagtgaaacattccgtatgatcccagagtatattaaggatacagaaactaatatagaagaaaaagtgaattttggggagcgtggaattgaactttctcgtagatttagagcattaaaggtatggctttcttttaaagcattcggagttacagcttttcgtgaggcaattgatcatggcattatgctagctgaacaagttgaagagtttttaaggaaagaaaaagattgggaagtagtaacacctgcccaattaggaattgttacttttcgttatattccatgtgagctaacatctacagatacaattcatgaaataaacaaaaaattggtggaagaaattaatcaaagaggatttgctatgctaagtacgactaaattaaaagaaaaagtagtaattcgactttgctctattaacccaagaacaacaaaagaagaaatacttcaaatcatgatgaacataaaagcattagcagaggaaataaacacatcgcctaaacatcttatatctgtttctcaaccttgatatattaggcggattttacatattaatagccgattcttatttagaatcggctattatatttaaatgataaatacatatatactatttataagtgtttctcttgtaatgggattaagcctcaaccttggatactcgtttgaaaccagtctttattgcttgtactatttcgttcacagcataaatagatacatcggcatttggatttaacccttcaaaccagtgataggcatttggatataaatgaaactccacatcaacaccagcttgtgctagtttgcttacataggttaatgtttcgctgcggaatggatctaattgaccaacaaatgtgtaagtatacggtaagtcactataatcctcagctcgagaaggtgctgcataggcagggatttgatccgttccatacatttctcctaaatacattttccagccagcttcatttgccttttggttccaaacaaatccctctttaatttcattcgctgaaggtgtatcatttctgtcatcaatcattggatatagtggcatttgtaaacaaattgaaggatattttcgatctcgtgctaataatgataatgctgctgttagtccaccgccagcgcttactcctgcaaccccaattcgattcgaatcaatgtttaatgactttgcattatcagcaatccattttaaagctgaataacaatcctcaattggtgctgggtaagggtgttcaggtgctaagcggtagtctacagacacgaccacacagctagcttcttttgcaaacctcatacaagtatcatcgttatcatctatagaccctaagatataacctccaccatgtatccataataagacaggtaaagattcatgatttgattttggacgataaattcgtaatggtaacggattatcatcaggcccaacaatgactttatctgttaaagaaagagagtcatcaacaacggtaggtggtctcatttgagctattccttctctgattgattgcaaattttctgggcgtaaatcgagatccggaaacatctctaatccttgtaataattctggatttactctagttttcattttagcacctctatttgtaattgttttcaaataaatgaagtgtattctaagtagtttaattgtgaaagaacaccacaattaaattgtaaattggatatgttataacggtcaacagaatattcggaaattaaaacctttctcaagaaggagtttcatgcaatcaataatacaagtagtggatttaagagcaaagtggtttaatgtcgttgtaattatgtacattagaaaaatttatttttgagtctagaaaaggattagattcttttctagactcatgaagaattatgaaaagcaaaattttatagatagttatcttaaaaataaacaaagagagaagaactagccaatgttcttctctctttttcatatgtaattagggtatccataactgtaaatacggatggtatagatttatggatgaataatttatttttaaattaataacgtaatacataaagatttttgtatgtaatattgcatatacagggaccactggtgaaaatgctgagcaatgtttttccatatggtaaattagttccttagttatttattttatttcattttcaatcgtgtaaggcttggggctaagatttacaaaggtgactagtaaaaaatataacaatataagtataagattttgtacttagtaatctcacaatttaaggcatgacattggataagtgtgaggagttcaatcgattttgaataaaatcaatagtatcagttgcaatttttttacgtttaagaacgatcccggcatgcccacatttataaatatatcgtgtaggtctttcccaagattcccacaagtagtctgtatcctcagaatgcacatatagatcatgcttacctgaaattaataaaatattttctttttttacttttggcaatgcttgactcggttcagtgattttccaataatctattaaatcatcatacgtaacaccatgatgttccaagtcttctctaataaatttacctggagttgtattccaaatagaataagaaagtcgatttgcatagaaaatggatgctaacacatcaatttcttcttcaacaagagaggttaagttagtaataaatccgcctaaactaattcctattagaatcagggtcccctttttatttgctttaatccatttaatcaaagctcgtaaatcagctaccgcttgtctagttgcttgtaatgttcgttcaatatttgcacttaccatatactctccactgaataaggattgatcgggttttctttcaaaatgatagggtagagtgaaataatacatattccacttcaggctggtcatatgatcgtggaatatttttttcacacgttcgttagaatccattctccaaccgtgaacaaagataacatgaggtgcattttcattttcatgtaagaataattccccagttacagagtcgttgcgtgaatcaccggattgaaccgaacttttatagttgaattgcccaaccatgtattcattttcctgctttgaatgcttaatgtcaaaatgaaaatgtgatggttttactttataaaaagattctatgttctttatatttaatgaagtgttagaaagggaagtaaactgaaatgctacacttctttttttgtgtaaatcatataaggcgtaccgatcaatgagttttgaaaaaatcaaattaacctcctccaaaatacatattgtttaaaacatagacaaaatttatgttttaaattaattaggaaatattctcttttcctaatagtaggtgcttgaattataaaaataggtgataaatttgtatattatattataaatcgtgcaataaaataaaactataaataatttatattaaaatttaagaagaatgttaacttgtttcttttcttattaaaagatgtaatttctatgaggaacttaacaattcccatctagatattcacaaatagcttctctatatttattgtatagaaattatacaataaatatattttttatattatatacattaaattaagcttaacctctttttctataagtctcttaaattgactaactccttaccaatattcaaaaacgactgcatttttgaatttgtgttctagtttttcttgaacaggtaaatgaataactacacataaactccttatatctctagttaaactaccgattagctccatataaactctagataacctatatagaatacaagttatcaaggaggtaagaaaaatgaattttatgaaacgagcaattctcagtatgaaaaaaaggataggaacatcattaattttgatggcagtttttctgattgttacaaatttggttctttcaggttacacaatccaaaatgcatcaaaaaaagcagcggatgctgcaagaaaaaaacttggtgcagatgttactttaggtcttgatttcgacaaaataggtcaaaaagctaaggaaactggagaaatgccaaatccgccgcagctcgatgcaaaagaaacaaatcaattagcgaagtccaagtatgtaaaagattataattacatagctaacactttcggtatttctgatgggcttaaactagtaggagcttcagaaggagaagaagaaggaaaaggtaaagtgggaatgacggctgcgcgaggcggttcaagttctggtacagaaatagatatgaatgcttcttttatgattgagggagttcgcaagactgcattacaagaaagctttaaaaacggaaaaagtaaaatcattgatggaaaaccaataacagagcaaatgaaagatcagaatgtagctttaatggaaaaacgattagcggaattaaacaatttgaaagtaggagacaaagttaaagtacaatcaggggataagaaggaaactcttgaggttgaaattatcggcatttacgaaacaaatgagcaagcaatgggtcaacaggctcctcctattatggatccagctaataaactatatatgccgcattcaactatgaaaaaattagaagtagaccaaggtataagtagtggtcaagtcgtgtatttcttgaatgatccacaatatattgatgcatttaaaaaagaagcaaaaaaatctaacattgattttaattattataaattagatgcgcatgattcattgtacaagcaaatgattggtcctatcgaaaatatctcttcgacttctcaaatgattatttatattgtatcgattgcaggtgcaattattttaggattaatcattatgctatcaattaaaggacgtcgtaaagaaatgggaattctattgtctattggagagaaaaagtggaaattgatagcgcaattcgtagtagaagtagtgtgtgtcgctattttagcatttggattatccataacaacaggagctaaagtttctcaatatatcggagataatttactttcgaatgaaattgctactgcaagcgaagaaacagatacttcgcaacatggtactgtaatgatggctggatctggtggtactctacaaaatcaaaaagaagatccaattgataaaattgatgtaagtgtaacaggagaagatgtagggaaaatgggtggaattggactagctattgctataatagcaacgcttcttccagcattatctattctacgtttaaacccaaaacaaattcttttaaaagatgaatgaggaggcttaatatggagacgattttacagtttaaaaatttggattattattatgaaagtaatgggaaaaatgtagcgatactagataatgttaacttttcttttcaaaaaggacatttctacacgattttaggaccatctggatctggtaaaaccacaactctgagcttaggttgtggactggacgtccctaaaaatggttatgtactgtataatggcaaagatattagaaaaattggtttggatcgataccgtaatcaaaatgtatctgtaattttccaatcttataatttgataacctatatgacagctcttcaaaatgtcttaacagcaatggaaattacgggtgttaaagtgcaaaataaaacagcaagagcattagaattgttagaaagggtaggactcacagaagttgaagcgaaacgaaacgtcctgcaactaagcggtggacaacaacagcgtgtagcaattgctcgagcactatcttgtaatgttgatttactgattgcagatgagccgacaggaaacctcgacgaggaaactgcaatggatataatagaactatttcaagaacttgcacataaagagaataaatgcattattgttgtgacgcactcacaggaggttgctaaaaaatcagatcgtgcagtgtatttaagtaagaagaagttggtcgtaaatgaaatctaatataaacatcgtagttttttaattcacataattttcaaaatctagacctttcaaaagcttatatttgatttataataaaatcaagccataatcaaaatggtctccctgtactgaatgttaaaatagtttgttgttcccgttttaataatataataaaaagaacttgtaggatattctacaggttctttttattataattggttacctatatcatgggataatcacacataaaaaacgggacattacctagatgtatgacctaaatatcgtcccgtttacctactctgtatagttattgcagaattaaacctacaatcataattaaactaaatactattatccaaccaaacgcacaatagccaaaaattctaatccatttaggtaattgatgcatgttaattttatttgtgggaactccttgcatagaaaacatcattttttgatctctatctctattattttgttgttcatacatactatcatcacctttccagaactattgcgtttatagtatatcagcctaaagaaaattatgtacagaataagaagggatagcataaatattatgtggtgaattttataaataaatgcatttaattgccatggttctaagcgctaatagagcactacataaataggactcattttcttcaaatattaagttgctggatatagatcaggaccaaggtaacgttcttttataatttgaagatgatgaagctcatgaccagcaataatgtatgctaatgcatgaactgtaacttcagaattattcgcatttcctctttgtgaccaagcttctttatctaagcttctaagtaaatgcagggtagattggcgaacaactattaaattcccaagaagatcttgcatagattgcttatcaaaagcagctctaagaacatacatatcatcaaatgaaaaacctgttaataagtttatacttactacaaaaacaaacaaactcgtcctatttaaaggagagtttgtttgtttttatgtttagataatggaatactcatgcaaaattgcacactatgttccatatttttcattgaatactttatatctagtgtttcaagaatttgtttaacaatatatagccccaaaccatttcctccagtatttcgatttcttgatttttcaattcgataaaatggtttgaaaatttgttgtaaatcttcatctttaatattgacacctgtatttataatttgcattttgatttgaccttgtttcgaatcctcatttaactttatatagactttttcattatgtggtgaatacataaccgcattgtgtataatatttttacatgctttttctaaaagagcacaatctgtataaatagaaaggtcaaaatcaatttcttttattatttcgatgtttttttgagaagcaaaaaattcgagatcttttgtaattgtacctattaattttgaaagattaactttctctacttttagtttgaaggtgtgttgttctaatttcgatacgcttaaaatttcacgaactaattgttccatactttcaataatttgatgatttttctttaaatattgatcgcgattttgataagggccaatattgtatatcattccttctaagtatcctttcattacagtaagaggggactttaattcatgtgctacaatcgcaaaaaactctctgcgttttgtttctatttctctttctttttcaatatcattttttaattgttcatttgctttttttaaatcaaacatagcttgttgcaagttaatagacatgtcattcaaactattagataattctcctaactcatctgtagagcgaacctcaattttttcggagaaatctaaatttgccatcttttgtgcaccttcattaatataaataagtggctttgtaataaacctggaataaaaataagcacttcctataccaataacgagcacaatgatactaatataggggagaaagcgtactaaaacctgtgaagcttcatcaatcggttgaaatgtagcaaacactataagcgttaaactaccatcttgaaattgaattggtttcgtaacattatatgaattgctgagggtacttgcattctcgaatcgtgttgctttagtaactactgttttttgcgtaccactttgaataaaagaaaatgaaggagagtaaataattactccttctttattttgaagataaagcatcgcattatttttttttgcgtattcatcaaaaagtggtatcgcatcttgaaacgtaagatttttagacttatcaatgatttcgtttatccctgtttgaagttgatctgttttatattgctcataaaacgtagggagaaagaagtataaagttaaataaatcaatactgcaaaggataataaaatgagagatgtagtcataaagagtttataagtaatttgcttcattttcatgagtttcacaatactattcatcaattttataaccaataccctttattgttttaatataagggatagctaattttttgcgtaggtttttaatatgtgtatcaattattcgtgtttctccaaaataatcgtaaccccagactttctctacgatattttctcttgtgagtacttttctctcattttgaaatagtagttgtagaatttcaaactcttttgtcgttaatataatttcaacgtcatttacatatactctatatgcatccacatcaatacgcacttctttaaatatcaaatgattatttacatttttatcataacttcttctaagtacagcttcgactcgtctaatcaaaacatgaaatgaaaagggctttgttatataatcatcgatcccaaggtcgaatcctttcatttgatcttcctcttcttccaacgcagttagcataataattggtacgtttgactgacttcgaatcattttagaaacttcaaacccattaagattgggcatcatgacatctagaagaattaaatcaaatgattgcttattaaattgtgtcataccctctagtccatctgaagcgactatcactgtataatgctgcgtcattaaaaattgtttaattaattcctgaatttcttgatcgtcctctaccacgagaatatgatagtttttcataatatcacctctggtagtcattatagccgtactatctggagtttatgtggagatacaataggaacttcataggacgtttaacgtattagcttcattttcaagaatgtgtattctccaaaaaaatatgattagccatattcctttttatgaaaaaataattgtatgcttgaaaaaacttatcgtatgaaaagctgaacgatttatatttctaaaaaaccaatgtataatattgggaactgcatgtgatttcttaaactgtgtgaacatatactttcgctacttactagaaggggaaacggaaatgaatttcaatataaaaaaagctagcgaaattatagagtgtacttcacaaactttagagttttttgctaatttagtaaacgattaaggtgtgaactaaggattatttaaatcatgcgagaaaggttgtgaaattatttgatgggttataaagcgatgctgtttgatttagatgatacattacttgatagggataaagcagtagaggcattatttttaattgttttagaaaagtgttatgaaaatgtagatggtgcggctaaaagcaacatgttacagaaattcaaagaatacgataaaagagaatatggcataagtaataaaacgacagttttagaatcattgtttgatgaattcacgccaaggtatagattgccacgcaattacatccaagatttttggaataataatttccctagatgtttttcaatagaccaaaatactattcatttcttaaatcaaataaagaagcgctttaaagttggaattataacaaatggctcaactcagaggcaaaaagctaaaatatttaacacgaatttaaataggtattttgaaacaatcattatttctgaagaagtgggatttagtaaacctgataaacgtatattcgaactagcattagataagctaaatttacaaccggaaaatactttatttgttggggatgacttagaaaaggatattgctggtcctcaaaatgcaaatataaaaggtgtgtggtttaaccctcagaaaatcaagaatactaccaaaatacaaccatatgccgagattaacactttggatagtttgttaagttatgttactccacaatatttttataacaagtaaaagtaattccatatatatattcaaaaatataaaaaaagagaaactatcattaatttcattgaccgtattagtaataaaaaatatgtatttacaacaaaaaatagaggctattttaatagctgaggctaatttaatctatgattaatacgaagttttgtaaaacaattttactcatactgtataaattataaaggggtgggactatggaaataaagaaagtagtaatcgatggaatcaatattgcggtcattaggaacgataaggtattaatatcggatgttcagtctgcattagatactatggcaacagttcaatatgaggtagatgcgaaacatattattatccataaatctttaataagtgaagatttctttgatctaaaaacacggcttgcgggcgatatccttcaaaagtttataaactacaaggtaaagattgctattgttggagatttctctatgtatactagtaaaagcttaaaggattttatttatgaatgtaataaaggaaaagatattttttacttagcaactgaacaacaagcaattgaaaaactaagtacattaaagtaataattatatcctgctaaattcccccatttcacttagttcatgattatatacgatatagaagaactgatgtttgtggtaaactaagagatgaataaagggggcgttttcttgaacaattttaatgatacgatccgagatttaaacaatatagtttacaaacctaacaatttaatgattacgaatctaaaagaagaaaagcaaaacgcagaatatgcaggatgtttattccacttaaataacaaaaccattcgttttagaaaatcaaaagttactcctaataaaattggtcaatttgtttctttttgggagaaagatgaaaatatgcgaaatagagctttctcttatgaagctgctcctgatttattagtaatcacttgtattgctgataataaactaggacaatttatttttcctaaagaggttcttcttaaagaaaaaatattgagaacacaaagtcaaacagggaaaatggcaatgagaatttatcctgtttgggataccactgttagcaatcaagctaaaaggagccaaacgtggcaacttcactattttgttgatttaagtgatagtaataatttgcctatagataaactattaaatttatattcgtagcttttgatttgcctcaaaaagaagtaattacagaaaagacatttgtaatgacgctttctattaatttacctcgtgaatcgtaatttttgtaccggtacagttaaatgaaatgtacattgttacagtgccccttaaaatttacaatcagcatatattatttaaacttataaatttttaaggggtgctaattatgacaagtttacaaaatcagcttttcacaagattaaatcttaaaaaacgtaatgaagtaacgtttgaagaattacctactatactcttttcatttgcacacactataccatttgagaatttagatgttatagcacgaaatacgaatcaaatctctctggaaaacttacgagagaaaattttaactagttcccgtggtggactttgctacgaattaaatactcttttttactatttcttaaaaaactgtggctatgatgtacaactggcattaggtacggtgtataaaaatgatataaatgcatgggcactggaggatggccatataacaattattttaacttatgataatctacagtatttaattgatgtaggtatagcttcgttagtacctcttgttcctgtaccttttactggcgagtctgtttcttcaaaaaatggttcgtaccgagtgagacgaaaagatacaagtaaaggaaattatgttttagaaagaatagatactgatggagaatggaaagtttgtcatgctttttataaacctaatattgatgagatagtaataaacgatgttcaaagaagagtgatagaagatgagaagtctatttttaataaaggaccaattgcagtaaagttgacgaactccggtcatatttcattaacgaatacaagtttaactgaagttattcatggggaaaaaactaagcgtgaaattacagaaaatcaatataaagagtttttatatactttatttgctattaagttatgaataataaagatagccggttcttattcagaagcggctatctttattattttggtgtaaatggttttcttctaatatgtttcggaaactgcggtatagttaatgtttttaatgtttcctccgcttcttcatatgtatgaaaaattggttcttttccatcatccccttgtaaaactagcccttcatctcgaattacatatggcataaaaccaccccatctagtaaagaattatgttcttttgcagcagaataatacgatttaaagtttgattttcttaatacatataatacactagaacagtacgaaaaagtatgtacaatgaattttgaatgtaaaggaagattattatgtcagttattgataaattgaaacttaataagtatacaaatatggtcgttattaacgaaccaagtgattatgacatttttacaggtaaagaaactgcattctcaaaagaacacgatgctatctttatatttgtagaaacgcttgatgaaatggtgaaacaaacgaattttattattagtaatgaagaattactaattgaaaaaggttacgtattcttcgcatatccgaaaaaaggtaatgctcgttatagtacgtttattcaccgtgatgagatgtttccggcattaaacgttggagaagatggttatgtgggagaaagcgacattaaatttgcacgaatggtaagtatggatgaagtctttactgttgtaggtttaaaacgcgagaagaaaaaaacaacgaaaacatctgctatgagtcaatgtgttgccgattatgcagatcgaattaaagatgttgaagcattattagctaatcatccgaatgaacttaagttttatcaaagtttaacgcctggatatcagaaagattgggcacgtaatcttttttctgtaaaacaagaaaaaacacgtgaaaaacgtctagagaaaatgatagagatcctttcacaaggctataaaacaattgaattattccgtaagaagaaaaaataatgattaagaaagtcacaatgctgcaacaattaattgtgatgagtacattgaaaaaagcattccttccattatactaaggaatgttcttatatttatataattagtaaaagagaaaaggtgtttgaaatgaaatcgtatattgtagttggatctggaattttaggagcgtctactgcttatcatcttgctaaggcaggtgcgaatgttactatcgtggatcgccaacaattaggacaagcaactgatgcaggagcaggtattgtatgtccatggctatcgcagcgtcgtaataaagcatggtataaaattgttaaaggcggtgcacgttactattcttcgttaattcagcaattagaagaagacggtgaaactgacacaggatataatcgtgtaggtgcaattagtttacatactgacgagaaaaagttagatcaaatggaagagcgagcttataaacgacgtgaagatgccccagagattggtgaaatcactcgcttatcagctgaagaaacaaaaaaattattcccagcattatcagacgaatatagttctgttcatattagtggtgctgcacgagtaaatggaagattattacgtaatgcattaataagtgctgcgaaaaaacatggtgcaactttcataaaaggcgatgccatattagtccgtgaaggaaatcatgttacgggagttacagtaaacgatgaaacaatcttagcggaaaaggttattgtaactgcaggcgcatgggcgaatgaaatcttgaatccattaggaattaatttcttagttacattccaaaaaggacaaattgttcatctgcaaatcgagaatacagcaacagaaaatatgccagttgttatgccaccgaacgatcaatatattttaacgtttgacaatgggcatgtcgtaattggtgcaacacatgagaatgatactggtttcgatcatcgtgtaacagcaggtggtttacatgaagtattccataaggcattagcagttgcacctggcttagaaaatgctacaatgcttgaaacgagagttggattcagaccattcacaccaggattcttacctgttatcggaccactacctaactttgaaggaattctcgttgcgaatggattaggagcttcgggtttaacagctggtccatacttaggagcggaacttgctaaattagcgctgggacaaccaattgagttagatttaaatgattatgatgttgctggcgcaattgaataatatagggtactgctaacatttaggaagaaccatgctaaacaaattcgacaaggaataagcagttttccctctgttaagagtaacctgtttatgaaaaataaaattctttaaaaatagaaggccgacattataaacctgcattaataatgtagaattgtgatgtcggctctttatttatatttatttaaaacttattttcgagaggagcttaagcaatgagagcgccatatcaagtattgatatttccttattaaatgaaccaatagtaaacaaaagtaccgtacatagtagatatatctactatgtacggtactaattttataacttcatgaagtaatcagttgaacaaatgggtgtcctgctacatcgccataaacttaacttaataggcatgggataacataattgaaaaaatattttaaattttctttattcatctagtgatctttggtaatatttaatttagagatgtaaagaaaagggaatctatattgcacatgcggaatatcttgaaatgattatttaattggatagagacagtagtggtccttgattcttaaggatgcgtttatttgtctatcttaaaatacatggtgtggacaattaaattcccattgctgagcagatacctttgtatatctgcttttatttatgggcaaaaatacatctctattcacacaatcatagagtccctaaattgggggattttaatcagaaatttaatgagaaatcagtacgaaaaagaagaagcactaacaggaggaaatgtctccagtgtatattgtttttgggatacggttcgacgagaattaaaacctgatagtattaaaattcatacattgctaaaacaccttgaaaacaaaggtttaaaacgtgtgccaaagtttctaggcatcgatgaataaggaagagagattcaattcattcgcgaacacggaaaagaatggatttaagagaaaagtcctggtgaattaatggattgtaagtgattaaaaagaaatgccaccctaaaattcttaagttgatggacatgcggctgtacccctgaaggaggactgatgtcgaaaagtctcgcgattgtcgtcatgggaggtcttattccatccacactgcatatattaatagtcgtatctattatttttgagttgatagaagtatggctacgagaagagagaaaaaccggagcgtcaccctatccgtctaactctataacattctgggaggatgtcacgttgataattgatttaattgtcgccaatttagtaatacctggcttgttgtcgttgtggatctggaaatcgcaaggatcgagcttggttgggaccgtaacttgtttgttgactactatgtcttatttcatattttactggctcggggattcctataaagctttgacaattttcggtttaatttggatgccatttatcattttcgcatcttatcgattaataaaaaaaacatatggaagtcctgtatttccacacgaaataggtaaattggcgactctaactatcattatcatgacctcttttatatttatttatttgaacatgactgccttacaatcaactttttataagaatcagaaggaaacagatcacttcatcttttacagctctaaagcggattattcagaggttgtaaagcttgctgataatttagaacagcattacgggcgtatcattggcttacttaaaacagagccaacgacgaagacaaaagtaacagttttttcaaatcaaatcaatctggtatattcgttggggctattttctaatttttggtcattaggcgtatttagcgatgaaaaactatttatcttatcaccgaaaaatcggtcttctatattaaattcaagcattcatgaatttacacatgtcgtactgtctcatattgacagtaaacgacctacgtggctggaagaaggagttgccaattatttagggaatacggatcttaatgtccaaaaagtgctcccaaccttggtttctgcggataaaatacctaactttgacgagataaatgggccagcattcgtgtatagaaacgggtatccatattcctatacgatcgtggaatttttggtaattaaatatggatatgagaaattaaacgacttcattcgacacccagaagaatataaccgaatatttggcgtcagcaaatcagaattacacagtctttgggttgattatttaaaagcgaattatagccactgatccaagattgtttgccgcacgcgtatctctctgattttcacctgtattatgatcgttctcgatgttttccactttccggtacttggtcctgctgttcatacaactatggatataaaaattattttatcaatatttataatgagctttctatactgttggatttatgcaggtttttgcagaataatgatgaatagattatataaagtgttgtattgacaatggcataatgaggattggagattgaattcatgactaacgttgcagttagaagaccgaatttgaatgatgtagatgaactatatttatttttccgtatagttattacgaatacatacaaagatgaaggattgtcacaattattagatgacatagaaaatgaaattaactcaaaaaagcagtatttgaaaagtgactttgatagtaacggagaaagtcgttactttttattagcaattgatacaagtaacgataaaatcattggaacaatcgaaatcggtccagcaagtacattgattaatagttgtacaggtggtgtacttaaaaatttgtatgaaataggaactgtattcatacttccggagtatcagagaaagggaatagggagtttattactacatacaatgtttcttacattacttagcagagggataacagaatattgtttagatagtggatataaaaatgcgcaaagtatatggatgaaaaagtttggaaaacctagctatgtattgaaagattactggggagaatccagtgatcatatgatttggaagaaaagtttacatgatacacctataatatttgaattataaaatgaaatatgcctctgaacatagcttttcttacttatgtatgctattatttatctttataataaaagaggacgtgaatgaacttgattaaaattaaaattcctgaagctgatgtttcaattactgaacgtaaacaagttattaaaggagacgagccaatcattactccaattaatggatttatcgatttccacttgttccctagagataaaggcggcatttttatgttttacaatattaatgacgaacttcttttcgtaggtaaagctcgtaaaattagacaacgtattaagaagcattttgaagataatgtttcaccaattaaaaatcaccgtgatgaagtataccgcattgatgcatgtatcgtagaagatccaacagaaagagaaatttacgaaacatatatcattaatgaatacaaagcgaaatataacgttgataaagtattctacaaataatcaacattaataaaaagcaatcctagctaatatgcaaggattgttttttatttagatttattcttcatatctttctccttttttcaaatgattagcagcaacaaaacagattacacctataaatataagtacaataccaaccgttttatgttttccctcaaagaaaggaatatctgaaataacatttgtcatacatagtcctaaaaatacaaggatagggcccacccaaagtaatacattaccgaattttgtgtgcttccacataataaccctccttaaccctctttacatatatatccataaataaaaagtaaattcatagagaaatatagtttttttcatatcgaaaatttaaccctcatatattggtacaagcaaaagagaaaggagaccatcatgaattggttagaagctttcatactaggtataattcaaggtttaacagaatttttaccaatcagtagtaccggacatctttatttaggaaggcatttgttccgattagatgaggctggcttatttttagatacgatgctgcatattgggactttacttgcggtttttatttattacaaaaaagaatttatatatttaattaaaaacccattttcaaagctcatgttattacttatcgttgggacaatacccgcagttgtaattggtttattgtttaaagacttctttgaagatatttcaaaaacaggaatcacgatcggttgggagtttttagtgaccggattctttctctacatggcagataaacaaaagaatggtcgtaaaaaaatggatgacataacatataaagacgcattaattatcggttcatttcaagctgctgctatttttccagccatttcccgttctggaatgacaattgtcgctgcattatggagaaaattagaccgtgaaactgctgcgtacttttcttttttactatcgacaccagccatcgttggagctatcattttgcaatttgtagacgtttttcaagggaaagcagaatctatttctagtacatctttaattgtcggaacgttatcagcagcgttttttggatacatagccgtttcatggatgattcaatatttaaaacgtcactccttaaaagtattcgcgtattacgtatggggattaggtattttaattttaatgttgcaatttactgatgtattttaagtataatgataaagaagttaattagtttaagatcctgtttcattcatacaaggcaggatctctttttattaagggggaaaatatgtttaataaggctatcgttattggtggaagtatggcaggaaagtttgcagcaaaagcattatcaacttcttttaaagaagtaatcattatagaagctggtgaaagatgggatggaaaatcttcgagaaaaagagttccacaaagtaatcatcctcacgtgttattaaaaggtggagaaaacgcaattgaagaattgtttcctaatattacgaacgaattaatagaagcgggtagtattataaacaactttacgcgtgatttgaaatggcatcaattcggtctatggaaacaaccgttcataggggaagtacatatgattcaacaaagtcgtcctttgctagaatggcatattcaaaaacgaatacatcaaatttcaaatattactattaaatatgaaacattggttaaagggttattggtagatgcaaagcttaacaaagtgtgtggagtaaaagttaaatatttagagacaaacacacaagaagaagttcatgcggatcttgtagttgatgcgagtggatttggctcaaaaagtatagagtggctacgagaatacgaaattaaagtacaagaagagaaagttcgtattgatttattttacgcaacgaaaatgttcaaacttaaagaaaatgaggagttagactgttgtaatatgctaatgtctcctagtttccctgataacccttatggcgttcttattcaaacgatagaagataatcgttattttgttacttttagtggatacgcaaatgagaaagcaccacaaacagatgatgagttttatgattttgctgaaaatctatcaatttctaatgttacagacttcttaaataaggctgagggaattactgatataaagacatacaaaattccttatcaagtacgccggcgatttgatttagtgaataatgtaccagaaggattattagttgttggagatgcgcaatgtcgttttgatcccgttttcggccaaggcgtatcagttgctgctatggaggctcaccaattgcaattacttttgcaagatagaaaacaacttgataaaacatttacacaacaattttataaaaaggcagctactataatagaaacgccttgggatatgacaacaacagaaatatcacgtcacccgcaactaaagagagaattaactacaaaacaaaaatttcagctatggtatacgaagcaaatatatcgactatccgcaagtaattctgatgtttatattcggttagtacgagtgatgaatttaattcgtagtccatttcatctctttcatccgaaagtgctactatctgtattacttaatcgaaagaaatagcaggaatataattgattaaaaaagaatgtataacagttagtaaatcaagaaggagaatatggaatggaaatatacatagagcaactaaagaaacaagatgctaaggatttatttacgtttgaacttacaaataaatctttttttgaaacaatggtaccaaatcgtggctcaaaatattttgaatttgaatatttccaaaaactactagacgatttattaatagaacaagcggatggagattcttatttttatttaattcgtaatgaagaaaaagaaattgtagggcgaatcaatttagtagatatagatacggaaactcgaattagttcgctcgggtatcgtgtcggagaaaaatttactaaaaaaggagttgcaacagcagccgtaaaattaattttagatgtagcggaaaataatgaaattactgaagttcatgctaaaacaacgactaataatctcgcatcacaaattgtactagaaaaaagcggattttcttcttatcaaaacgaatcagatataacatctgtagaattaaatggagaacatgtgaagtttgtacactatatttggagaaatacttcacacttataataaggaggacttattcatgaatgatttacgttatccaattggccaatttacatacaaacgtcctataactgaagaaatgattgatacatggattcaagaaattgaagatttacctaatgaactaacaaaggcaattaaagatttagatcagaagcagttagatacaccatatcgcgttggaggttggactgtacgtcaagtagttcatcacgtcgttgatagccatatgaatagctacatacgctttaaattagcactgacagaaaagaatccaactattaagccgtataaagaagagaaatgggcagagttacctgattcaaaattaccggtagatgtttcactagtaatgctagattcattacataaaagatgggttaatcttttatattctctagaaattgaagatttagaaaagacatttaaccatcctgaaactggtgaaacaaaacttgctgttgcaataggactatatgcatggcatggtcgtcaccataccgctcatattacttctttaagaaagcgtctaaattggtaacatggagattatattagaaaaggtgacagaaactgatgcagaagttatatttcaaatgcaaatagattcatttagctctttattacataaatataaagactatgaaacaaatccagcaaatgaaactattgaaaaaactatttttagaataaataatcccagcagtaatttttataaggtgataatagattcgaaacttgttggagcgatatgtatatccgcaaaagaactaccttataaattttggattagtccaatgtttattcatccaatctatcaagggaaaggaattgctcagaaggtacttattttaattgaagaaatgtttccagaagcacgaagttttgaacttgctacgattttagaagaagaaagaaattgttttctatacgagaaaatggggtataaaagaacagaagtaataaagaaattaaatgataaaactacacttgtttattacaaaaaagaaaggtaaagcatttaaaatacgctttacctttttatgttattttagattaaatatacaaaaacaatgtatgttcttccaaaatactcgggttagtaattttgaaaatgaataaagatacaaaaaccactactttgtcgtaaaggttactagcgctttttgaatgcttaaaatactatcgtcacctttaaattctttcgtaattggttcctccatactagacacccaaattttaagttctgcatctaaatcaaaatgcccagccgtttcgatgctatattgtgtaatacttttataaggaatagaatggtattctgtttttttgccagttactccttgtttatctactaatataagacgacgatttgtaaatacgattagatcacgaattaatttataagcatgctctactttttcatcgtctagcataatcttctctaaatcacgttctacattttcagaactcgtatttgatgcatttcctaaaataccgctaaataaacccatattaaattcctcctttaatatatgtggaatgaattacttatattgtaccatgttactcacaaagatattatcacattactttagtagtttctggttattgttgtaattagtttatataacctcatcttaaaatcttatgctaatatgaaattaagaaaaaagaagcagagggatatagaatgaagaatatcggtttagtattagagggcggaggaatgaaaggtttatatactgcaggtgtactcgaatatttcatggaaaagaacttattctttccatatgtagtcggcgtatcagctggagcctgtatgggagcaacctatttgtcgcgtcaacaagggagaaataagaaagtaaatacagagctagtatcagattacaggtatatatcttatcgaaatttaattcgaaaacgtgaattatttggaatggactttttatttgatgaagtacctaataaaattgttccatttgattttcaaactttcttaaactgtaatgaacaatttgttatagggacgactgattgcgaatcaggacaagctgtttattataataaaacagaacatggaaatgatattttaaaaatcatccgtgcatccagctctgtgccgtttatagcacctgctgtagaatatgataatcgaaaattactagatggaggaattatagatcctataccagttttaaaagctcaaactgatggttatgaaaagaacgttgtaattatgacaaagccagaaggatacgagaagcagcgaaataaattttctggtctagctaaaattctatatagaaaatatccgaaaatcgcagagaatttagtagaccattatcgtttttataacgagacgatatcttatatgaatcaagaagaacaaaaagataatttttttgtaattcaaccaagtgtacagcttcctataagcggaatagaaagaaataaggaaaagctcgttaatttatataatcttgggtatatcgatgctcaatatcattatgaaaacttattaaattggctagagaaataaaggagtggtaggtaaaaaggttatttttaatgaattgcagaacatgcctagtctactgtataaaccgtttccgaattgtgacattcgaaaaataagaaaagattttaataatacgtttacagaagatgattgtataagcgctgatttaaattattattggatgcatacagcaggtactttaagttacgtgtttaataataatgaacaggagattgtgtttaatcaaattaagtggctaagaaaatcgttttttgagtggtttccgcaatatcgttttctagaaacagagattataaattatcccattttatatagagatttcatgaattatgaaaaaacccgtaagctattactttattatcttactgaataaaaattaaaacgtacaagtgatgctgtttgtacgttttttgttcataaaatatacaatattaataccttgtccatgtaggtattttaacgagaaaaaagaagtacatataaaatatgtaagagggaggagatagaagcttgttagctgttttccttccaattcatgtccaactcaaatatttcgagtaaaattcgcttctaaatggtattatcaaatatcaagaaaactaatttagaaacgaagaagggacaggtttaatatgaaaaacgtatcaaatgtagataaagtagaatccatacagtctttacagtcaacaatccgtaaacttgaaaatgcactatctcagatgactcaaaaaggtgcaaatactacattagtgaaaaaaagactcaaagcagctagtatcggcttagctatgttagaaagtatttggaatcaagaaacccatcattacacccaagaggatttagcagacgctcgaaatgttctaattggtttgttgccatcaattgaaaagatttatgttaagtcaaagcttgggagtcctcaaagaacactgttagaaagaagaataaaatcattggaactttctattcaagcaattgatcatctttctaatcaataacttctctaaacacataacttacgactacttttatatagggattctaatgaaaaaattacatatagaatactacaaaggagaaagagaggtgatggagaaggtaccaataaagcgtctgtgttaaaaataggtatggacgtgcagtatagcagtcgttttccttcaaatgattatccatccggaaagattgaaacatattctttttatagttcgattttaaataacacacgtaaaattcatatttatacgcctcatgattattctcacacttcacatcttcaagaacttctcattgtatttgatgggaattcattcattcataaccttccaatcgcaaaaacacttaattatttaatttacaaaaatgaaatcccatcttgtattgctgttgctatagatcctgtcgatcgattagaagagctaacttataatgataaaatgaatgcatttttcaaggaggaattacttccgtgaattcaggcgaagtatcgtgtgcatcaagaaacaaaacatacaacaattgctggtttcagtcttggtggcttagcagctttttatgcaacacttcaaaatccacatgttttcggaaatgtgttgtcaatgtctggatccgtacattggaaaaaagatgattatgaaaatcaaatttaatcaatagattctaatgcgactcatctctattcttacatagcagtaggagaacttgaaaacaaacctcttttaacggctaatagacgtctgtataaagctttaaaagaaaaggaataccaaattacttatgaagagtttcaaggcgatcatggtagcgtgtggtggcgagaaaagctattcgaaggattaagggcattggaatttacaaaaacgacactaaaaaataaaaaggagagagaagctatgaatcaagaagaactagataaaaaactaaaaaagcaagagattttagtaaaagatgaaaaagtttggtcctatacgtatgaggatcatattagttctatcgttaaagaggcagaaaagaaagggtcatttgataatttacctggtaaaggtaaacctcttaatctcgataaagatctttcttacaatcctgaaaagcaactttatagaactttagcaaataatcatgttttgcctaggtggattgagctttcaaaagaaattgacgatttaaaagaaagactaaaagaaaatacaaatacggcagaagcagcggatttaattcgaactattaataaaaaggttttagaacataatttactttgtccaccaagtgcgcaaaaaacgagggtgaaaacggacttttaacaatttttcacgaagctatttcttgctatataattaagtaaggcattttcaattcattactaaagggaggcaaatgtgatgaagaatacgtatcaacttcaaattccgacagaactagagcagtatcgtagtattttagaagaaagtataaaaccgtatgttaaagtgtctggaacattagcagagacaacactttttgagagtaagtttggtggttatccgtatttacctatagatcaagagcatcctaaagactcaaatggacaacctatgatgctacttgcgcagttaaactttgaagaaattccgcatgttgaatatatgcctcaaaagggaatgttacagtttttcgtaagtgctgatgatgagctttatggagcagattttgatcatccaacaatccaaaaagactttcgaattatttatcattctacaattatagaagatttaaataaggtaattactgattttagttatttaaacactttagaattagaagactttatcatacctgaagcagcaaaactgaattttgagttagcttatcaaccagtaacaccaagagattatcgatttgaaatgatttttagtgataacattgattgggaagaaattgttgatgaagaaaataatacagaattaggcgaactgtatgatgatttatgtaaagatcaaggacataaaattggtggatatccatttttcacacagacagatccgagagaatgggaagaaaaataccagcaacatgacatattattgctgcaaattgatacagacgattcattaaatattatgtggggcgattctggggttgctaatttctttatacgtaaggaagagctgttaaatctagatttttccaatgtcatttacaattgggattgttactagaggatataaataaaataatagcaaacaaaaaatcttcctgaaggtgaggaggatttttttatgttaaaaataagcgttatgttaactaggataagaaacaatgagtgtaatgaaagtcaagcctaaataacagaaataacaacaaataatgtgaagttgtaaaacgtgtgcaaatagcaataaattcataaagtaaaacataaaatataattattaatttatattttgtatagaaataatttttctgtataaaaaatttcttgtcgatcaaaaatgtttttgattcgataattcttaattgattattgatttgaatttgctgtgatggatttatagcaaaataaatgataaaaactgtagaaattcgtttagataagattttgtgtaaatctcactaaaaatctctgtttcgtctcattaagtatagtttacttggtttttgatacccgatatcgctttgtccctataactgcctataatatatattatgttaactgtaaaaaagtaataaacttactaagttttagttgtgcttattatgatccccttttccaccgaattagtaatgtgtgattggttatgtatttattcgctttattagctattgataataatattttcggatataaattagattttaaataataaaaatacaattcgtttaatctgttcattttaaacgaattgtattatgatgacgaatatttttttataactagtttgctacagcgattgcttcgatttcaattaataagttatcgttaattaactttctaacttctacagctgaacttgctggtggattattagtgtcaatgtattgatctcgaatatttctcacaatggccatttgagaaatatctgttaaaaaaaatgttaatttgactacatcattaaattttaattccgaagtttccaatgcacttttaatattttcgaatacttgtcgcgtttgtgtagctaaatcgtcaattccaactatttgaccgtcagtgttaatcgctacttgtccagatatgtaaattgttcgtttagcgtttgtaacttcgactacatgcgagtatccaaaagttggtggcatcgtttctggattgataaatttcttttgcaaggctcttctcccctttaaacatttcattttcttaatgttaggttttgatttcagattatcctctatttactaataattatttatcgatttagctgctacatttgtaaaagtgtattagcactttaatttaaagttattgatggattatgtacgtttgattttttttgtgcttgttataattacaccttgttttattaattcttcagttacttttgtatagaaaaagtgataccaccagataaaaaactcttcataagtaatttcttttgagtatctgctgctggcaaagtattcttttaaagatttatcgttttcattaaacaataagactaaatctttactgatccaagatgaagcattacaagtaaatattgaagtttcgttccttttatttttatagatggcgaattatctccagagaaaatcattttagcttcataagctgtatgtaatatattctccggaatattattagtaaacacttcataacccctcccttactagtaaattcattgtaagatttatgtatttactaacttctataaacgaaaataagtatcctctaataatctcaaattaaaaaccttagcatagatatactaaggttttttgtatttttataatgaatgaattctttcatagtcttttttaaattgattatcattttttaaccaacttttaaaagttggttcctttatttctaaaatggaacaagttttagcgatacatttatttttcatatattccttaaggaaattttgttttctctgcttaacagcagattgggttctttttaggtttcgatcttttaattgatctagacttagactttctttctgaaattcttcatattttctatgcaaataaatatctttgtctttataaatccaatttgaaaatagttgtattgattttctcccggttaaaatgacgcgataatgtttattttgatttagtaaatcggctggtaaattgtgattttgtagtacctgatttaaagaattcataaagctatatgatcctcctacaaagcttactgtatacgtttcatacttgacgtaaccatccccatcaaaatatccacgaacaaaatgatgtaaatattcttctggtacaaaaggaaattcgatgttaaatgatttacatggcataattccgtgcatgttcataaggtcgtcttttattgttttgctattaatatttagcatatatacacctgtttttttgttttggtatagcggctgatttgtttttagttctttttttatatcttctaaaatataactttctttttgtgatatactgacgcattgattttctttttgtataacgccgtcagctgctataaatcctaaaatataagccatattatttgaccaagttttaaaataattttcttttatgtcatactttctcttccaattccctatagcgcgccttgggacgttgctgtctgataaaaccatacgaatataccttgcagacacattagcaagtgtagcgatctctgaggtgcttttcccctctgcatatagctgcgttatttcagattttgatagtttacattttgatttcttttttcgctctatgtgcacttacatcctctccttccttttaataatttgagacttatcttcttctataacatataacgaaacgtacgttctttgttgcttataagaagaaatttactaaattaaaaaagtttacatctacttaatattgattttatctgctgctacatggtttttattttgcatataagaataatgaatttgacaaatttatgaaaggtactgcatttaaggtgaaaggtaaaatgatttcgtttaaactacaaatagctacaataacaacatacgtatattgttaatcgtaaaaaggagaacgaatgaataagaaatatacaaaccaaattcatactgatatgagttttaaaccgaaagatattataagtttaatgacggattactttaaaatgaaatcaaagctgcgtcctataaaggatttgcctgttgttttatcaaataaagataatgaagcgttagagagtgttacatggtttggccattctgcttctcttttgaaaatagaaggtaaaaaactgttattagacccgatgtttggagatgcctcttccccatttcccttgtttaatagtaagcgttatagtggtgctttttctttagaacgtgatgaccttcaagaaattgatgcgattatcatttctcataatcactatgatcatttgaattacaaaagtattatgcagttaaaaaatcgcgcaaaacacttttatgttccaactggagttgcacaatatcttattaaatggggtgtttcacctagtaaaattagtgagcataattggtgggacgaaattacgtttgataatattaagttagtatgtgcgcctgcaaggcatttctctggacgtggtatgacagatagagatcgttcattatggtgttcatggcttattcttggtcaagagactaaaattttctttagtggtgatagcggttatgcccctcactttaaggaaattggtgataaatacggtccattcgatcttacattaatggaatgcgggcaatatgatccgaggtggtctgctattcatatgttgcctgaagaaacggtacaagctcatattgatgttaaaggagaattacttcttccgattcattggggtgcttttacgttagcattacacgaatggagtgacccgatagaacgtgttacgaaagaagctaaccgtttaggagttaaaattacaacgccacaaattggcgaatctattacgttaaaatctacagactatcctttatccgcttggtggaaggaaatttaattttaaaatataaaaagagcgaatcctcttataaagaattcgctcttttttctgtatttaaacttatttcactatattggatctcccactatctaatactctatttgctggtacactggacatttcaaccactgtattcatactcttatcagtcagttcaatgagttcgttttcatgttttattttatttaaatcccacaccattccatgaaattcattatgttgaccacttacctgtataatgctttttgttttatttgaaggctgtatttgaaggtttgtaaattgattcccactaatttcatttggcgtagttacttgactatccatataaatcatatttacacagtcttctaaagaaaagttcataaaacgattggcatttatccaagcttgtccggtgctcggttttttcgctactaatttcagtccagtttccattcctacaactttaatattttcgaagttaacaaacgaaatttcattttcttttccagcagagtataaagaaattccggtacctttattcgtttccgtccaattgataatatttatatcttttatttgtgttttgttccaagtgttataatatttatttttaccgtctaaataaataacttcagagttaaatttaggatcgtcaatagttatatacgctccttcaatggatgcgtttttctctagttctaaaactctaaagtttccctcaactacaaattgggatccataaccaaataataatttcacaccttttttaacaatgattggtgacgtgattttatactttttatcatcaagcaatacagttttaattttactagactctgctttattaatagcagattgtatttttattgaatcattttcccctttaaagttttctacatacaagttagtacttttagctgcatagtcttttttgttgtattgataaaaagcaaaaataattaaaactataccaatgagtaaaacaattattttcttcatcgtactcaccccatatcgattaatctatggcttttatattcaggttattattattttgctttgtatttcagattaccattgctgctttgtctattaatcccttcctctatccttaataagctcttactggcgatataagatgtactgctgcagattgctctcctgcttcaatcaatatcggtcgcatagaacctccaaaacttaaagtaatcgtttcttcttttattgctcttaaagcatcaaccataaaacgcccatcgaaagatatatttaattgtttttcaccttgaatcgcatctatttgttgcgtttcagatattttcccaatttgagaagcgtttgaagaaattttaattgtggattcgtttatgatttctaagttaacattgttattagcccattcacttgctaataaacttgatcggtctacaccttgtaatatcttttttctatctacgttaataatcgttttaaaatcatttggaataaggttagaaatattaggatatttcccttcaattagtcttgaatataatgtagttgttccgagcgtaaatataatatgactctctgaaaggtagatatatacgaattccgaattgctgttcattaattttagaagttcactaatggttgcgcttggcacaatacaatttgcttttacatctgaggaaagtaatgtttctcgtatcgctagtctatgtgagtcagttgcagcgcaaattaacttattattagataactctatatgcaccccagtaagaacaggtctagattcattttttgctaccgcaaagactgtttgtttaaatacttcaatcaattgctctgtctctaccttgatttctgcatgattgtctataagcggtacattcggaaactcatctgcaggaaatccatttaaacttaatgtgatttcttctgattgtatcttaatagtttgctcattcttactttttattgcgatatcacttggcattttctttattatttcaatgaaatactttgcaggtacaaccatagttcctacctttaaaatagttgcaatcttttcgtcttcaattgaaacaggaatgaatttttcaataaaaatatttgagttacttgcaattaaagtaattccagattgatctgcagttatttttataccagataatataggaattaaagattttgttgatattgctttgttgacttctgaaagtgcttgagtgaattgtttgtgattaacgataaactccatgtttcccccgccttacatgagataatatttttatgaagattgatgaacgattgttccgttaaaaaaataaggtactgtttctttcttttgtaataaatatagtaaatgttctggtatgcgtaaatacggtgctgctatatgtaattccatccaagtaatctcttcgatttcttttggccttgatatatatgtctccccgccgattatttcgcctagaaaattaaagaaaattgcatgatgatctctttcctcgaaaaaggcttcactgatagaacaaatcccgtttacgtttatgtgtaaccctgtttcttcttttacttctcgaattactgcttcttctaatgtttctcctagtttaactgcgccacctggtaatgtataataagaaccattttcccctttgttttttaccattaagatcttttcattagttttatcgtacaaaatcgcgtatgtaacattaacttttttcatatgtacctcctctattttaaataaaaggaattttctgtcttctattcattctaccattaactccttttaatatatataagttagttaagtcttgcctttaccgctattgttggagttaataagaataggctactgatataaaaaaagaacgtaccttaggaagattatccaaagtacgttcttgcagttttagtataaaaattgattcaattaatactgaaattaataataacctcgcccttattgcatttgtatttcaaatactaacgttaacaaattctatatactttttaaccgtttttctaaataataatgattatgtcctttcggatgatcttcacttactccaattactttatatccatgtttcttataaaaatcaggtgcttggaaactaaaagtatctaaattaattaacctacaccctttttcaattgcaaattcttcaataagctttattaacttgcttccgtaacctttatgcctatattcttcagaaacccatagaaactcaacgtgtacatggtgccaaaaagttattgctgttaccccacctactatttcttctttttcatttcttactatgaaactaaccttttctgaaggtgttttttcttcatctgcaagatatttttgattgtattcaattactttctctcttatgtaatcactatcttcttgtacccactgctgtactattttcattttaagtgtcacgctcctttttacttatctattcaattttataatgaaattgtcctgtctttaataagttcgtaaagaagcaaagttaatggaataaaaaagagccctaacatgaggactctttttaaaattaagctactttccgatgtaaatgttttagttcctttttcttttctacatttggtgggcggattaatattgaaataatgaaggaaataacacttaaaacaccgattataatgaaagttggttgaaatcccccgagtatcgctccaataaatgatcctgcaagcgcaccaaatccgaaaccttggtagacaatcccgtaatttgtactatggttttttaatccaaagaaatctccgacaatagctgggaatatagttatattaccgccgaagcaaaaggcgacacttgctacacaagcaaaatagattccgtaatttagcggaataaaacttaaagtaaagactgacaatcctataataataaacgttgcagagacaattttcattcggccgattttatctgataacgtcccaagaataattctacctactgtattaaaaattgcaatcatagcaacggcgtttgcagcggttgctgcgctaagtccaacgagttgtacaccgatatcttttaccatactgattaaatacaaaccacccatacacgaggtaaataacataaaaaatagcagatatacttgtttcgttcgcatcatttcacgcggagtatagtcattgtgcaatgtttcagttacagcattacttacaattgcctcacgtaagaagaacgatccgattaacactaaaagtaacacgataataccccaatataagaatgcttgtgatacaccaaggttatcgataaaatttccgtttatatatctaaagattaagctgcccattccatacgctgatacagatatacctgaaataagccctttccgatttggaaaccatttaattaaattagatagtgatgtaatataagctgttccatccgcataaccaacaacaacaccagctaataaatataatagtggtaaggaagaaacttgtgaactaagtattaagccgagtcctaaaacaattcctgcagtagcaataagtttccgaagtcctaattttttctgcaattttgctgcaaataaagttgagaatgataaagaaaaacttgttatagagaaagttatcgctactgaattaagattccatccaaacttacttacaaggggttgattaaataaactccatgtataaattgttccaaggccaatttgaacaatgattgtacctagaacaattagtaacggatttatagaagtttgtttcatactaactgtccccttcttttatcttgacatagattttcacagttagtatatccatcgtaaattgcaagatactgtacggaaaatggtaattaagttcatatacacaaaaagacacttcataaagaagtgtcttttgcaggttatatcagatgtttctaaagaaagctttgttaagataagccattttcgaatgcttatgtatatatgttatcaaataatttcttatatgtgatgagacttaagacgtatttttcattcatcatatagtcggatgaaaaattaatattcgatttcatcaaaatccttcggctgcggtacagtttgcatattagctgcatctttaggatcgctataaattgcattttgctctgtatttacatcttttatattttgttttttatttttgttcactttatctttcacttacaatcactcctttttgttataggagtaattatgccctattaccgttactaaatgtatcagcgactaaattactaaattcacgtaaataatataagtaattatcaccgccgtagttatatcttttgttatacatttttgcaacaactacattatattcaggtattactaaaatagtcggtccagtaatccctaatatttgatatgacccttttggaacacgttcaccaagttcgcttaattgtgcaggttcattttgaacgaaccaaaacaagccattttgtggtagctctttatttacatatgttggactctgcaaactcgtagcgatttttataacttcttttggaacaatttgcttaccgtttatcacaccttgatttaaatgaagattgccccaataagcaaattctctagctgagacaaacagatttttttcagtaccgtcatctaccgtaccaatttcactagtcgcgtcttcatttggattattaacaacgtcaactaaattttcatctcgctgaactctccaacctgtttcttgaaaattagcaggcttaaaaacacgctcctttaacaattcaggaaaacttttgttatatagctgataaataagacgtgtcatcattcttacattaatatctctatatgcccatgcttgtcccggttcaaattcacgaaaaattgtcccgtcattcatttcttctaatccgtgcgaatgtgttaccaaatgtcttatcgttgttttaccaagcaatgcaggattaaagtctttaaaatattttatcgcttcatcatcaatagagtttattttcccctcgtaaagcgcatacgctatcattaatcctaaataactttttctagcagaagcaacgttgaactgcgaagatgcggttacttttttattagtcgatgtatttgagtgataaccgctataatgctctaatacgactttattattttttataatacaaattgctgtagcagaactatgatttttttcttttatattctctacccaagaaatcaacttatcatatgtatacaaataaatcccccttaatacacatcaaaattacagtatgaaagaaaagtataaacagtatttacacctttctttcatataaaatattaatgatgtactatatttaaataatccaccagttccagcaattaaagcaaccaaaacatccggcacaacctacgcaaccaccacatctgccaccgccgcaaccgccacagcgtccaccacaacctccgcatccgccacaacgacgtgcatcgccttggatgtaataatatggatattggctttgttgttgatcccaatacacaacattaccagtttgataatcattaaggtttaatgtttgtaattcatgttgaaactgattcattacgaacccctccatttataaatataaatttcgcccaaacgttaaagtttatatatttttgtaaacaaaatagaaacaagactatagactaaatgcgtacatcaacaaaatatgaacttacactaggtgatgtaccttgtttttcagcctattttctttatatttattcgatggacgtatttactataaataaagtgatttaaaaattactaatccaacaatttagtagttcatcacttaactttctttctagtaattccttcactaaaggcattggcatgatttcataatgatttaaggcttctttattataatctattcagtgaaatgctaaatgagactcgctcgatttcggtgttaagtccgtatgtaaatcttgtgactctacttcaaaaatgtgattaatttcatgatggagcacttctttatcttgccattgattttctatgactcctaaaaattgttgtatactacagtttactccaagttcttctcttaactctcttattaatgcattctctactgattctccaatttcaacatggccaccaggtaaaaaataatgatggccaatatattcagcaactaataatttttcatcttttatcatgactgctcgtacaatatgatggaatttacttttcaattgatattcctcctagttattcaatgtatagttgctcaaaatagtcatttagtattggtataatataaatcataggtgtttcatacggatgcatatcattaataacttcaagagcatcttttacaagttctcgtttacactttatttcaactttacattcttgcccttcgcatattcgaccaatttctccattaaaaggagatgcctcgtctaaaggtctccaatatcctttcactgaactataggaaagacaatggtcatattcgcccgttttacatgctccaattttatttaattcatcccttaatgtttcaatatattcttcaggaatgaatacttcaattttcaattcagtaaattgcatatttcatttcacacctttacttcataatagttaaacaaataaacgatatacttgctcaccatcatactcctgtcctaatgatatgaaaccatatcgttcatatagtttctttgcagagatattatctttatgtactgttaatctaatttctttacacgatttaaaagtattttttattatattaatactttcttgtaatgctgcttttccataaccattaccttgctgcgattgatcaataataaatccgttaatccaatacatatctgatgtctctcttacaacagcatgcataacaaaaccaaccataaggtcaccatcgtatatagcgagtggtatgtactctacattgtcaccatctggttttatatatactttagcaagcgaaactgctacggatggaacaaatttcaactgattttctttaacttgtagttttaatgcttcttcccaattttctctcgtaacaacctttaactggacattcaatattgtaagctcccttatatagaggatgtatgtttatattcaacgtagcgaaataattccctttttcgacaacgacttataacataatttttataaaatcttgaatgaatttttctgcatctatttctaaagctatacgggctccttcagatttagagttagggcgaaaatcagcaaatgtttgtcctttcgtatctccgtatgtatctacattcactgtacgatgcgcaaattcaaaaaaactttggttaactaatccacttatagcaaccacatcatgaagcaatggcccttcgatagatggattaagtttttggtatgcagaaaaatagtaatcatacattggtttcattatcgtatggaatggattctttgaattagcttgaatatagtcaaacacatttggtgttaacacagctttgtttgttacatttaaagggaatatgaataaattctttgcttgatggaaaacaattttacttgctataggatctccatacacatttgcctctgctaacggcgtaacgtttcctacttctaaaaaaacaccacccatgaaatagattccttttacatttagcattaaatcattccataaattaaaagcaattgctaacgaggtagatcttcctacatcaacaattgtcaaatcttttccgtactttataagaatcgcagcaatactgccgaaattatatattggaatagataatacattttctggaacatggataggccctaatccttctgctccgtgaatttcaggatagtacgtagtaatttcttctgtaagtggttttgttgcaccactaatgacaggaatgtcttgtctatttgctaactgcaaaatatacgttgcattatgtgcagcatgtatatgctcaacatttccgtatccagttacaataccgacaatttcaatttcgggatgcagtaagccatacataatggcaaatgagtcatcaatacctgggtctccgaaaaataatactttttccaagaaatacgctcctctcacgaaaaaattgagtcattagtaactatgtatatgaaaaaagcaagtatatctatgcaaattttagaatggataatgttttacaaaatattaaaaaggaactagcgtatgctaattcctttcttgagtaaccattctcaaatttaattaattatcgtatccttcataaattgcatcatttatttgattttgtatttttgtatcatcaggtacaggtttccaccaatttcctgtaataaataacatagttaataaattataactatcactaaaataactttctctcttattcttcatccaatcccaaccgctatttacccacttttgattattgctacttgttatacttgcagcaataaacggtgaaacaaatacagcagttgaataactaccaatattagatccatttaattgataaccatccacaattttagaaggatttccattcgttttattttgaatccacgaagaaactttatcagaaatgactttacttcttttctcgccgtacatcgcatagtccattacaattctcaatggtacccgactagcattgtaataatatgcatttgtatattctgactcatctaagaagtctttaggtgcgggttgtggtgggttttttacaacgaaatctgaaataagtcctgtatttggagagtatgtattactaaattgcgtataaacatcgtacaaattattaataacagtaagccaagttttatcacctgtaaattcataaaatgctctaaggtgtgacatcatccaatcagatggtctcgtatcaagtgaacttttagaatcccaatctcctaaatttagtcggttattatttgtaacattactagctttaataccttttgtaatcatgtcttgtgcttctttcaaataattaactgttccattagatccccactgcttatgagcaagaagaagagaatacgcaatatctaaatctccatcagtagcagaatcaaaatgaccttgtgcttttttactatctgcgacaacccatcccattaaattaggattttgagaacttttaaaagttcttgctgttttaaataaaccgtcatagattttttgagcattcgaatcataaccagccattaatactgtaattatcatcccatacccttgaccttctgaagttccaagtggcttaaacccatctgcatcacctgtaatctctccttttatgtaataaccaccaggtaaagaagataaatcatttttcaaatatttctttttccaattatcgtagtaacttcttacagaagcatttaaactttcctgtgtaacatgattcggttttataacacctgcataattaacttgctgcggaaatggtttcatttcctttgcagcagctacttgttgattaactacgggaatagaattttgtactgaattgtccgttacacttgctgcgaaactagaattagaaaaactagctagtccgattcctacaatagaaatacatgtgaaaatttttctttttccattcattatgttgtcagctccttttaaaatgcttactacataaaatgtaacatacaatatttaactgaaatacaaaatattatatttatcaacataagaaagaaactatataaaaaagtatcataaaatcattattgaattacattatacggattgattatttactaaattcctatgtttttcttttcttaatactggtatatgagcaatcacaattccaagtatagtaattccaccgccaattattgaaactaaagttggcacttctcctaaccatatccaagcaatgaaacacgcagttattggcgttaaatatagagaacttgttgcttcagaagcaccagcacgagatataatataggccaatgcaatatacgggagtactgttggaaagacacctaaatatataacactcaagttaacttcaagaggagctgctaatatttcttgataaactccgggtaagaaaataagcatacatacagtactagaaaaaattgtatatatggtaaatggtaagaaaccgtatttttttaagtaagatgtttggaaaacgaaaaatagactttctgaaatcgccgctaataatataaataatcccccgctatttaattgaatagcgtcgccttggctaaatgaaattaaggcaattcctgcaaaactcattacaccaccgatccagccatttaatttcattttttcattcaaaaaaacagaagcaaaaattgccgtcactattggagtgactgaaattattaaacttgcagatccagcattgactgttttttcgccgtaatttaatgcgatgtgataaatagtaaaccctaaagcaccaaatataaaaaatgctgggatatcctttaaatccggtaatcgtagtttgtatataaatgaaaataacaaaagtataaatgaggcgattaataagcgtagtaaagtaaggtgttcaggcgtataagattcaagccccagacgaattgctggaaaagcagttccccatataagaattgtaaaagcatgagcacatataatgcgtaaatcccattttttattatgcatgttttctctccctccttaataaaccaaccatttttaaattaccaattatttcttttcatcatatttaatagttgatacaatgtcttcaaccagttatttatcggaaaaaccaaccactttgaatcttttaaattaacgaaggagttttttatatgacaaccgataaaaaagtgcccaaatatcggcagataatagactatatgaaagaaaaaattgaaaacggagaatggccaattggaagtaaaatccctagtcagcggcagttagcaaaattatttcatgtaaatcgaagtactgtaataactgcgctagatgaacttatggcagatggtttaattcaaggacaaatcggagcaggaacaattgtaacaaataatacatggtcattattagcaactaatcccccgcctgattggagtgaatatgtaaaggccggtattcataaaccaagtaagttaatggtgcgagaaataaatgaagcagaagcaaataaaacgcttatccatcttagtaaaggtgaacttgcacctcatctttttccgctcgaaactatgcaatctataataaaaaacgtcagtgaggaattagattatttcggatacgaagaacaaaaaggtttttatccgttacgtgaagcaataagcaaatacgtaaaatcatttggaatacatgcatcaccgggttctatattaatagtctcgggtgcactccaagcattacaattaatatcaattggtcttttacatagaaaatcaactgttttacttgaacaaccttcttacttatattcacttcatgtttttcaatcagcaaatataaacttatccggtatatcaatggatcatcacggtattttacctaacgacttgttaaaacgaattaaatatagtcaaaagaataatattttatattcaatcccttgttttcaaaatccaacggggatattgatgtccaaagagcgaagaaaagaaatattaaaaatatgtaaaaaagagcagttgcctatcatcgaggatgatatttaccgagagttatggattgatgaatcacctccagctcctttaaagtcaatagataaacatggacatgtattatatattggtagtctctctaaaacacttagccctggacttagaattggatggataattggaccagaacctgttattgatagattgtcagatataaaaatgcaaacagactatggatcaagctctttatctcaaagagtagctgctgaatggataaatgaaggtttttatgaagaacatgtagcaaacgtaagaatgcacctgaaaaaacgaagacaaataatgatacgagctttaaataaatattgtgcagatattgcatcgtgggatattcctagtggtggagtttttatatggctaaaggttgtacataacattccgatgaaaaaactattttcagaggcactatcaaaaggaattcttttaaacccgggacgtatttatgaagaagaatcagatcagtacattcgtttatcatatggatatgcttctccagaacaaatgactaacggaattaaattgctcagtgaattaattcggaagttaacggcataaaaaaatcctcttttgtttttggaggattttttcacgtattttatttaccacaatttcatttcctgccctaataaaataagttcttcataaggatctccgtcaatatttaatacttgagcaaaagcaggttctgtttttaaaccttgttcctttaagtgaataacttcttcccttatatgaggatgctgcattaataacatgtgctccactatcatatgtctatatgcattttgattacgcactggcttaggttgagcaaataattcaaattcaaaaccttcgaattcaaaattcacctttatcgattcagtacctttcatttttttcttttttatgttgaaccctctataagaaccatataaagatctcatttcttgctcaaaaacatcaaagttatatacttccattacaatatctaagtcagattgaggagtatcaattcttatcgggattgtcccgcaaagaacgggattatataaagctaaatcctccataatatttagtttgttcaaaacatcatataccttttgttgcttgtcattccctgattgtaaatatgtaatagatgtaaacatggaagtctctccttcatttcacgtaatacgtgtctcactaaactcaagaaaaatttgtccgtttaaacttgttctagaagtacctttatttcaatatattaaggcgaataaacaatatgtttcaacttttctcctatactgcaatactataaaaataaaaaaaggaggaattattatgagcattttcaacgttcttttagccatccacatattatttggaacgatatgtttaatcaccggtattgtagcgatggttgctcaaaagaagaaaggaaaacatacggaatggggtgaaatatatcatgcatcctatgttgtgatcaccgttactgccattatattatccgttataaactgggataaaatcgcatatttattttatgtagcaattttctcttattcatttgcgatttatggatacctcgcacgaaaaaaacgttggaagaattggcttcaccaccatattagaggtatgttaggctcttatatcggtgctgttactgcacttttagtaaatgtcggtattcatattcccttaattaatttacttccgcctatatggttttggtttttacctacattaatcggtattcctctcgtagccagtgtatcaaaaaaatataaaaagcgtagttaaacttcattacattttcgttactttctgatgattattatgaaaaatcatactcaatgtaatattttttttataaattcaagatcgtattgctttaagttagtcacttagcgctaaataagaagaatccaataacagtattggattctttttcaaatttcatttcaatatcggctttatgcattcaatgatgttaccatttggaccaaaaaccatctttgtatacttgtgggtacttgttttattggttcagtgataattacaccattatagtttaagattgtaataacgaatgtaaacgatccgggtaattcgtaaacatcccatcaacgccccataaaagtaactttttcatatctttttcattatctacagtaaatggatgaacttctaatccgtgcttctttattctctttacataagcggaatcaatatatttatagttcatcccaagaccgatgcagtatgttttatacttttttatctctaattcagttaattgaactgactttttgtaaggtagtaattgtactagcggtaaagtaacatctaaactatgaattttttgcagactttcttcactaaatgattgaataataacgttatcacttatttcgtagtgctgtataatttctaatagcttctcttccataccagcgtattcatctggtgattttgtttcaatataatagtttgcaccattcccgaacgtttcaataatttcttctagtgttgggactttagcatcttcaaagtctttctttgctaaacttggatgcttttcattgaaaaaagaacctgcattaagtttctttatttcttctaatgtatgttccttaactagacccgtaccatttgtagtgcggtttactgtttcatcatgcatagctactaaatgtccgtcttttgtcatttgaagatcaatttctatataatctccttttaattgttgtcctaatttatacgctgctattgtatgttccggcgcatacgcagaagcgcctctatgtgcaatgttttttatatgatttgcttgattaatagctttcgtgtacttacgttcatctactttatgtaaaacgaaagtacctagtaatataatggtgcaaatgattgtaatgatatatatctttttcataatgatgtattaactcctacatgaaagcaatttggatcgaataatttattcaattaaatgtcgattttcaaatacagtcatttgtccaacagattgaaaaccagcctttttataaatattaatcccatcaggtgaagcttgtaatacgcattgagaaactttcaattgttttgcttcttgcagcaagtaattaaacatagtggagccaaatccttgccctcgcattttttctttagttgctatatcataaataccaatactatcttttgtacatactaatgaaccaacagatacgacttcatctttaaaaatccctaaatatagtttcatattttcactattccataaatcgaaagaagcagtttcattataaaatgtttgcacatgtataccttcctctgatgtaccaaatagattagctaacgtttccccaaactttttaatttgtcctaacgaagatgctctttgtatcgtaaaaccttctggcatttttattgttggttgaattgtctttaagtctgctaccatcgcaatattttgttctgcttcttttaagccaagttttattaattcgttttttatagcctgttcatagctattatcccaaaaccaaacacacattggaaacttctttttattatagttgtttatcactttatataatttctcaatgtcttccgttacatcattgtttagtaaagtaatgatattaaatgtatctgcaggtaaaccacaatctacagcaatgtagtccttcgtttcttttacattcatttcatgtacatgacgcgcaatatatgacattttatatgtgaagttatctattaataactgtttataattcattcttttttctcctttcataaaaattcgtattcaaatcgttcagtattaaatataacatatacgaaatgtaactatttctataaaaatatctctataaatcactctatacgctctgaaagaattaaaaatgatataacgttgtcggaatgaaaaaagtggtatataataaatattaacattactagtaattattttaggtattcctagaataaagacctgcggtagtatgtcaactgaaaaacaaaagaatttttagttatcaaaggaaaacatcctattttttcttattcccccttttcgaggggatgggcaaaaacacccgagtagcaatctctgctggatccttttttaacagcaaagaaggtgcaaacggaaagtcaggaagcttacttgtccaataatcttttgctgttttatattcttcgctttgttccatttcatcatagataaacatataatcttgaaaatcaaaagataaagattctaatttttgatttggtttataataataatgcaacaaatcctgtccaacaatgttcatgcttgctccgtccattaataaagcatcgtatcgaaaacataataaatacgtgtcttcttttaaaagaaaagctttcaattcaaacaaaggccattgccccaaagggaatacatggttagtcattcgagaacgctcttcttgtaagcgagcatgttgattcctatcatctaaatctatgagactcactatttcaatctcgtaatcaggaacgctttgtaatatttgctgttttccctctggtaaaattacagctcgcaacattggatgacgatgaattaccttttgaaaactttttgaaagacgattgatatccaatgctgtttcatattcaaaatatgtttgaggtgaaataccgcttaattcaaactgtgaattccgtcctatcatatacgctgtctgaacttctgttaaggaaaatggcttagacaaatctttaacatgagttggtctactttcaaggttttcctctttatgctctaactttacacaagaactcaattgagcgattgtggggtgcttaaaaaaatctgttgtacttatttttaagcagtcttttcttaataaattaattacctgaagtgctttaatagattctccttttaatgcaaaaaaattatcatgaataccgattccctcaatctccataactttttcccatgcacgcactaatttttgttcaatttcattgcgcggagcaacgtatggaattgatacataatccgtttgtgttatatccaacaatctttttctatccacttttccatttggattcaatggaatctcttctacctgaatcattttttcaggaatcataaactcaggtaatttatcacttaaatattttctgatttcaccaaaagacaccttgttatccgatacatagtaggcagctaataatttcctatttccatatacttgatcaacaacgatagcctggtttatttctggatattcccttaattgagtttcgatttctcttaattcaatccgatacccccgaattttcacttgatgatccattctacctaaatattcaagttctccattaggcaaccaacgaacgagatcacctgtatgatacatcatttcccctgccgcaaaaggactcggtacaaatttttcatctgtcagtttatttttaccaagataccctcgtgctaccgctacgccagcaatgcagagttcaccaggaattccaaatggttttaattggccatacttattcaatatataggaatgataattcgggttaggtttgccaatcgtaacttctttggaagtgctcaagtcttttactgttgcgcaaatggttgtttctgtgggaccataaatatttaaaattgttgcttcactgatacaacgaattttttcaaccaaatcaatggaaaatgattctcctgctaataaaatagattttaaatcttttagaaaaatcgccccttctggatcactcaaaatcacttccattcgcgatggcgttgattcccataaatccaccttatgttttttgaccaaatgagacaattcttttgttgcaaactggtcctctgtagcaattactacttttgaaccttgcgttaaaggaagacatatttctaacaaggaaatatcaaaagatacactagcaagaaacaagaatgattgattagcttttactttttctctcattacatttaaaaaatgaactagcgatttttgttctatcattaccccttttggatttcctgtcgatcctgatgtgtaaataacataagctaaatcattaggattatgttctcgaactaaattactttcttcaccttgaaaaagatattctttatcaagatacagtacttcacctgcaaattgtggcaatacttcctctgttcgcttactaagtaaatattttgcttgactatcttgtaacatatattcaattcgttcagttgggtagttagggtcgattggtaaatacgctgctcctgcttttaaaatccccatcataccaataatcatttctaatgaccgatctaccataacaccaataatactttcttttgaaacacctttactttgaagaatagaagccaattgattcgctttcttattcaattctctatatgtcaaagattgatcattacaaacaacagcaatttgatctggagtttttaatacttgcgcttcaaacaaatcttgaaatgattgaaacaagtctatgcccgtttgaaaagtattcaatccttctaacaactctttttcttcttctgcaataatacaaatatctttcaatgccaaattcggattttgtgaaacttgctttaaaacataacaatacgaattggcaaactgttgcaaagaagagaatgaacgggacttgcaagaaatttgaaattcaaattcattatgtatttcattccattttcttcgtatccatagggctaaattattctctgcgtattcttctagcgaattttcattatgtaatccttccatcccgattacaatttgaaaaggagttaaattgtgtttaactaataattcagagagcggatactcctgattttcatacccgaataaagtcgtttgttcaatctcatttactaattgtttaaaggtgtgatgcggctggatttcacttcctaaaggaatcaacttattaagattctcactttgttcaagattcttttcaattataggaataccaatagtaattctttcttgatctgtataatgtgccaaacaaacccttaaagcggcttgaaaccagctaaataataataaatcttgagacttacttattttttgtatacttttactaaattctacattcactatgacttgaacgtattcacaaggtgtttctttatttagttggtaatcgctattaaatttaaatacagaaaaatcgagaacctcggaagataattgctccttccaaaacgcttctacttctttattttcatgaatcgaacttcgatctttaatgtgcatttttatctttatccccctaatattcatttcttctactcgttaattttcaagccaacttcaagcccatggagaaacacttgatgactatccaaacataaaaattgctgaatatcttcaaatttcatatgaccaactgaacaaacccctaaatttaatgtctcagcaaccatatttaaggtagcagtgataatgcctgactcaatacaagcaaataaatatccatctgaaccgtatttcgggatggaagcgttcgcattataaaccaaataaactgagaaggcagattgagtaaataaatcctgattaattaactcatgatcacttttgattacttgatcaatgttgtttacaatcacaagactattttttgatgggttataataataaaatccagctttcatatcctctatacgttttggttttacataaacaaagatatcaatgggatagagcccccctgcacttgcgtaatgatagtatattttttcttccctaacctgttttagagttgataagaatcgggaaaattccgaaaaactaatatgtttttccatatcaaattgacgacaagacctacgttccttgattatagtaggtagctcatttgttgtttcaagttgaatttcggtcgaccgtgcagcaacgtgcgtgcgatttaattgttcactcatatacttatctaacttttctttagaaaagcgaatctggttgctatatggatttgaaaaaatcttttcttgtgaagaaaatacttctcttgggtgtaatatgttacttactaacacacgattttttatcatgagctctatgtttttgtgtgtctcttctacatttcctaatgaaaagcgctctactagttcactgattttcacacctttttgagccataaaataaaaatcaggaaaccactcagacagaatacctgtaaatctcatttccccgatcaaaacttcattatgcaacttctcccaatgcttaatcggagaccagtaataaattttctcgctcatataaccctccataaacgtttaacttatttttgaaatgcaattttctaatttacaaaaattttttcggattctgctccttgtctcatagtgattataaatacatgcactttaacgaaacttgaaaataatgaaataactttttcttcattaaaattttttatttcatcataaaaaatgatttctttttggatatttcacatcctttcccatagtaatcctataaggtataaaccatttataacattgagaatattcatgtatttccaatgtgaaattattgtaatggattggagagcggttgaatatagttattaaatcaaataatgttgagaaagttttatttattatatcgataaaattttatgatgtaatttattacaaatagattaagaaaagagttttaaatttttcttaatcagttagtgtgaaaatatcacatactattacatacaatcgagttacttacatttcatatttaaaatagagaaaagacaccttgaatggtgtcttttctctattttaattccatatactttttacgcctttgttatttttaaacgatttgtaggaattaatacaactctaacatctagttcgttatatgttcgaatatataataaacattatataaattacgaatgtatttcaggtaattttataaataaactcaaagatatcttctcctcctactgtcacaaaagaaataatctattgcttatttcttttattaaattgtaatataattacagtatatgaaattatattacattaactttaaaagcgaagtgagaataatcttcacttcgcttttttcatttgcaatccttattaaatttgctcaatgcagtatttatttccacattcttcgtttttatttaatcggtttctctgtttttaagacaaatgaacttaatgcaggaactttaattttattgtcatggacaacataaagtggtttacttcccgcctgcttgccgtctactagtactttccaaggccctttcgatggaagtgttatttcaacagcttctctatttgcattgtgagccactgtaaagtattcatttttattcccctctattgtataagctacagtatttttcggagcatcaataaatgatacatgtgtttttatttgctctgcagatgtcattcgaaaagctgagtactttttgcgtaattctattaaacccttcatataatctacttcattattaaacgttgcacggcgcagccaatccatctggttaattgaatctggagatttgtaactattataatcaccgtatttcgtccgcataaactcttgccctgcatgtaaaaatggaatcccttgtgatgttaataaaattgaagaagacaatttgtgcatttgttttcgcatttcttcactgtcacctggattagttaactcaagtttatcccataatgtatgattgtcatgtgcttccacataagttaatacctgttcaggatcttgataggtagacgaatttgtatcatagtcaatacctgctgtaatgccttttttaatacgatcttccatgttttgctttccatttacaaaaccattttccttttcctcaaatacactacctttcaacccatcacgtatattatcgttaaaatgagcaatccctttcattttctctgcatttttttgatttgctttcaactcagctgcaagaggtgtatttaaatcccatccttctccgtgtagtataatagaagggtcaatttgattaacagctttacgtatttcattcatcgtttcataatcatgaatacccattaaatcaaaacggaatccatctaaattgtattcttttgcccaatatgttacggaatctatcataaatttcctcatcatttttctttctgaagcagtatcatttcctactccagttccatttgcaaatgttccatcttcattgtaacgataataataacctggaactaacttatgaaaattagattcagcagcattatacatatggttatatactacatccatcactactcgaagattattatcatgtagtgtttgaaccatttgctttaattcagttattcgaacagttggctcataaggatttgtagaataggagccttctggaacgttgaaatttttaggatcatatccccagttatattgcggttcatttaaagtctcttcatttactgaagcataatcaaatatcggtaaaaactgaacgtgagtaacaccaaggtcctttatatgatcaagtcctgtttttacacctcctggcccttttgttcctttttctgttacacctaaatacttccctttctgtttaataccactttcaggttgaatggaaagatcgcgtacatgtaactcataaataatagcatcttccggatttttaaattttggctttttgtttgctttccattttttcggatttgtttcttctaaattaacgactgcacctttatcgccatttacagaagcagcacgcacatatggatcaaccgcttcagcccacttatcaccaattttgaccttatacgtataaaagagccctttttggttcccctttagttctgctgtccaagttcccttttcaccttgttgcatgtttatttcagcacctattttatcgttccagtttttatatgtaactaacttcgcttcgcttgcagtaggagcccataaacggaactttgtatgttgcggagtatatgtatttcctaaatcgttgccaccataataaaataaattatcaaattcttcgctacgaatgactttaccaatttcagtattcgtatcagctaagttttcaattttaactttgtatgtttgttttaaatcaattttctgttccgtaattattttaacctgattagtaatatctccactgtttgtatcataaggagtaatatttttaattttaatgccttcaatttcaattttcttttccttaatatgaaacgggacattagtcgttacagtaatttcattgaaactatcaatagttgctttttgaattgagagatccgatgaaggcttagagttatatactttttcatcacccgaaagaatccatacttcagcacgaccgtcctttatattttcaatccaacgatccccaccatctttttcccattcatttgttcgaactataaatcctacacgattatagtcaccgtctatttttatcttagcgtattttccaaattcatcttcaccagtaaattcataagatgtaccatttgcattttctccccataaccaaagattccagtcttttgtatttccaagcttttctttgtaatgaatgataatttcagttgttttcgaatttgaaactgccttcacactctgaaaagagaaaacagatgataacataatgattaaagtaagtaataaaactgttttgttaattaatctttttgtaatttgcaccacatacaccctttcttcaaatattactaacgatttattatgctttcactgaataaaactgcttaaatttatctagaaatctctttaacttcacctccatattggctattttcacgtatgtatttcaatgaccttttaatacgaaagcgtttgcattaacgcttaaaaaaatagatttgtttatgccttcatatatttgtaaatactaaaagatcagggaaatcattttaaagcaatcgtttgttatcgctttcattttatagactttctatcaagaggtcaatatattattaattttctgtttttatacactttaaaccttattgatttgtcactacttcttaaagagaaagcgcctcattattgcttagtcagtttattttcaataatacattgctatgaaaaaaacagctaatatccttaaaatgacattagctgtttttcataatgtattaatatatgaatgagaactatatttctaaattacttaatttttgctgcatcaaatgctttttgaactgcttgaacttcagctgtattcgcaccatatttattagttgccactcgaatacatgctgatctcaattctttgaaattagaagtcatgtttaactcatctgtatttgcataatagaaaatatcaaacattttatcttcaccaattcctttaacagttactccgttatgagttccgcctttcgcaatgagatacgcaactttattaataatacttgaattaaaatgaacaccgccttgatcccatccattaaaatcgttaaattcactgtaatcatctggataaggtactccaagtgaagatggaacagaagctgggttttccatatcacggaaaacagatcccgtttgttctcccattgtccagttgaattttccattatttacgtatttctcaatagatgttcccataatatcagataatgcctcattaatcgcaccggattctccgtaatattcaagattagattcgctagaagtaacagcgtgtgtaaattcatgtccagctacgtcatatgctttaacaataggatcgccatatacaagcatacttccattattagcacttaatgcattctgccaatttttcggatcattcgtctcttcagaatcccaagcgtgtacaactgaaactactttttgtcctttattatcaaagctattacgcttgtatttatctttataaaaatcaaatacttttgttgctaagtaatgagcacttactgctttcggatcgttaaatgttgccgaagtactagtcgctaatgtaccaggataatagctttcttctttagtaatatctctgtaattcacatcatatgtttcaatgccttgccctcttgtataatcagcaagagcatatttgccattactttgtttagagataccaaatgaacgagaaatacccaaatcatcttttcctgttccagttaatgatgtaagactgctttgtttacttttctttaaagctccaactagtttgtcactggcttttaagttagattcttgtaccatattttttaacatatcaccattttgtgcatttactaaataagtaccagaaacatagtttggtgttgcagcttcaaaggtaacttggtatgcatttttagcttgtccattattttcatcaacaaaaataacctctttaacttctggctcagaaataaacttgagatcgttcccgtacttcgtataaataaattgttttgcttcatcttttgatagattaataggttttttcaattcttcttgttttaaattttgtgcgctatcacctgaaacacttttaataacaccattattatctacgtgtgcagttaattgatggccatatacttcttttccttcgtatgtttgttgcatacgcacaagtgtagttccatcatacgaaccacgtttttgaagaactttataatctactcctgcttctccattgacttgtttttgggacagagcttgctctgttttctccttaagtgcatcctttactacattttctggtgccttttgtgacggttgtgtaagttcacccgaacggaacgattcctcttgaatttggacttgtagttgatctgtttcctctgcatgacctacgccatatggtgccacagctgttaaagctaatcctgttgttaatgctaccttagttaatgtctttttgtttttcattatttcacctcgtataatttttgaaatagaaagcttgtacaaagtatactgtctatttttgtcggaaaaaagagaaaatacgaaatttatgtaacattatgcaaaattacataaattgtggtcaatattataaataatgaacggaacacatatgtacattaatttgaataaaagagaatccttataaacgctcatccaattggttagttattaattatctatattcattctaataaaagtatacttacatctaaataacaacataaaaacccactctttactattgtaagagtgggtttaatgctattaaaataacaattactataagaaaccttataatttatatttttttagtaatcctattaagttttttataaaattcaccttttgtctttacatgattaaactcatttggattaatatttgctttttgtgagagtgctacaatttcttcttttgaaattgagtctttcgtatttatagatgctatatttgtgtattttccgtcttctgtttttggaatttctaaaatccctttattcacgagatcaactacagccttatgctctgaagaatgtaaatctacaccagtaattttccaattacgcataacttttggagtgtatacaccattctttacctcttttaaatatgtaatagcaaggttacgaatggttccgcctgtttctccaaatgcattctcttgtttagatgaccaaatttgttcaaacttacgcccctctaaagctcccccttttgcctgaagagcctccattctatatgcattcattcctagcgtcataacatcgctcattttgattggtttgtttgtacgaatagagcgtaaatttgtaattctgcttccatatggttttgttaagtcaatttcgtattttacgcctccaaagaaatcgttcgtactgtatttagatgcacggcgggttttatcaaagctaacggttacatctccggcacgagatgagttaaaatatcctgctgcccattccatatagtcttttaaatcttttccagaaatcttatatactgtaatttctcccaaggcatattggtaattgtacgcaatatcttttttcttaataggacctgtatctaaacgggcataatcattatcaatttgatgggctactacatctgctttactgtagtagagcatgacttcatgaaagaaatctgataaaggtgtttcttgaatctgaacacttggaataccctttatttcattttcaggaacaagatttctaccctttaattgagcgactacaacatttgcatctcctctcgcatattcgtgaaaagatgttaatgtttcttcaagtgtaggatcagataatatcgttgttccatcagcattttttacaggtatagcggtagcagttttattttttaaagtcaacttcccatcttgctttgtaaaagtaaggtcaatacgtgaaatatgtgttccatatttatctggttctgtaataattacgccatttacaacttctttttttacaagtttatgcatgtgagccgcaaaaatagcgcttagttccggacaagcatttgcaatatcttgaacaccagtaccagggataccattctcattttctaatcccatatgcataactcctaccattacatctactttaccttctaattccttaattgcctttttcgtctcttctaccggatttttcaccactaaaccctctaagtgatctgtccctttttcaaaatcactaatcattggtgtattcataccaataatcccaactttaattccacctttttctacaattgtatatgcaggaagaaagcgctctccattttccttataaatatttcctgctaacgtttttcccttatattgctcactaacttttttcaatgtatctaatccaaaattgaattcatgatttccaaatgcccaggcgtcatatcccattgtattcatcgctaccatcattggcgattgtggtttatcgttgaataattctactgagtttccttgaattgtatccccagcatctactaatatggtatttggattttcttgacggaccttctttataaccgtataaagctgcgtcaaacttccactcatatttgctccatcaagcgcataatcccaaggcataaatctaccatgaatatctgcagtacctaacaatgtgatattaacttcagattcctcagccttagagatagatggtttgactattactgctgttccaagcagtaatagaattacaaagtaacatacatagttcttccatttcattttttgcataataataatatttctcccctttttgtactttcataaagttgcttgaactttaaaaatgtaacttattattcaggaaacttcaactacaaaagataattttgaaggtggttctgttgcaaaataaagagaataaattgcatacatcccctaacagaattgtattttatcgtttcctgacagaataccccttccttaagcgtgtgaagagtactttcaaaataaggacatatcattcatcatcataaaatcattatttcaatttactaaaattcgcatataaaatatgttatgatgattatttttttgaatttcattgtcgaagtatttccttctcaatgaaaatacttccaaaaaaataaccccgctcttcatttaagacggggttacacttatacagaaaatcggatagtttcatattttcttaagcttattggttactttcaactaatttcattctatttttgttttcttctgaatcaatatgaatcaaccgttttccctgtttataatacgcatcaataaatagggaatgatttttacttttcaatttcacaaagtaattttatctcttttatttgtgaaatatgacgctgttcatgtaaataaatcagttctatccactgatcaagggataattctccaagagctggatgcatcactgcttttttcgctaatatagactcatcttctattgtactcaggaaacgcatcaattcttttcttgattcgtttagcgtattgagcatttgctccacttcaaatggttctatacttggttcaatcatttctggagctataaactttttcgttctatctaataaaatagtgtgaatttctttacgctcattttgggtactatctaacttttttaatcctgatgaaataactgttataactctctcatctaataaaactaaatgatgacaaacttgtgcaatactccatttatccttatctggtttcctattaaattgagcatcactcaacaaattaatttcctcaactaattgatctctcgttttataaaacttgtcatttacaaatgtatccatgtggattctcctttcattgcaacctacatacttaaattcctacgctagaaatattatcttcaaaaaaagtttttctttcactactattccaatttcattttaaagctacaaatgaaattatttgttttttatatctttttaattggcacaaataaattaacctttaactttccgtctagatcttcagcaacattatttaagcaaaactctaaattatctctatcataatctgcatcatactcactatttggtagccactctgcatacatgtattgatacgcttcacttaatttatgaggttcatcatagaactggtatagaccatatgtacctccatctaatcttttaaattgcacatcatgatgcttttctttatcgaagttttcaggaatcgtaacacatgcatcatgccggcacttatgacttgcaacaagttcaggattatctaatgatattccgataaatgattgctctggtggataaagtttattttcaattgaccaattcagtaactttccccagtgatcttgtggttcaaagtagctaccagttcgtcttatatatgctacttctaatggtggaaatttttttataaaaactttcatttacatcttctcccctataaatatgtacactgtttatttagctttctttaaatatttattccttcttaaataaaaagaatcctctaatcacatgaattttaattgaaatacaattgattactattactactactaaagtagtatgtactttcatacttttatttgattttaaattctttttaaatcgatatattaattgtaagaaaataaaaaggtggaggattttaattgattaaaggaatatacgaagcgcatttaccagtataatgtcctatcaatttatcattaaataaatgtaaaaaataaccctatttattcatttttaatgcgtatgtatgtacatttgttaatttattcgatatattatgggtattgaatgattacgtgaagtgtataggtcgcttatataacaccttatatttttatatccgtgaaaactacaaagtgtatgaaaatccatttgtcaaatgaatttagtgcggaaggaggtttgtggttacttcatagggtataataatcagttttttactgataaaaatataggaggcgacataatgtttcgtacgatttcaaatttcatgagagtagctgagataagaaggaaaatcctttttacactagcgatgttaatcgtttttcgaattggcacgtttattccagttcctcatactaacgcagaggtattaaaagtacaagatcaagctaacgttctaggtatgttaaacgtatttggcggaggagcattgcaacacttctcaatcttcgctgtaggtattacaccatatattacagcttccatcatagtacagttactacaaatggatgttatacctaaattttcggaatgggcaaagcaaggagaaatgggccgtaagaaatcagctcaattcactcgatactttacaatcattctcgcattcatacaggccatcggaatgtcttatggctttaataatatagcaggtggacaattaataacagatcaaagctggactacatacttatttattgcgacagttttaactgcaggtactgcatttttactttggttaggcgaacaaattaccgctaacggagttggtaatggtatttcgatgattatcttcgcaggtctcgttgccgccattccaaatgttgcaaatcaaatttatttacaacaattccaaaatgctggcgatcagctatttatgcacataataaaaattgttttaattggactcgtaattttagcgatagttgttggtgttatttacattcaacaagctgtacgtaaaataccgatccaatatgcaaaagctgtttcaggaaacaatcaatatcaaggagcaaaaaacactcatttaccgcttaaagtaaatagtgctggtgttataccagttatctttgcttctgcatttttaatgacgccgcgtacaattgcacagctcttccctgattcaagcgtatcaaaatggttagttgcaaatcttgatttcgcacatccaattggaatgacactttatgtcggtcttatcgttgctttcacatacttctacgcatttattcaagtaaatcctgaacaaatggctgagaatttgaaaaagcaaaatggatatgttcctggtattcgtcctggtaaagcaactgaacaatatgtaactaaaattctataccgtttaacatttatcggtgcaattttcttaggtgctatttctatattaccgctcgtattcacgaaaattgctacgttaccaccttctgctcaaattggtggtacaagcttacttatcattgtcggtgtagcactagaaactatgaagacgttagaaagccagcttgtaaaacgtcattataaaggctttattaaaaaagtgaattaattattaaaaacacagttggttatttttccaactgtgtttttgattttatcagtcctgtaacatacagggctattgctttattaaattacatctccttctctaataaccgcccttttttgaaataagtccgtagtgttgaacgattggccaaaaatacaccaatcaatataagacaagcccccattcccattgtaggatttaaaggttctcctaaaatgatatatcccacaattattgcaattaatggtgatacatataaccacgtcgatggaaatactggatttgtttttgataagagccagtaatataatccgtgtccaccaatcgatccgataaatatgagatataaaataggccattgcacactccatgaagttaatacggttacatttggttgttctacaataatagatgcgattagtagtaaaatccctccataaaacatttgaataccgttaataagaaatggtgatacatttgataaatctgacagtatttctttcgaacgaatagagcctattccgtaaaataactcccctataactaacacaatacaagcaatactccatatgaaacttacttgttgatgcattcctggtaaagaaacaaatataacacctgctagtgcaataactaaagcaacgagttgttccatttgtaatttctccctatccctctttgcttgtattaataaaatcatcattggtcccgtagcagaaagaacagcagctaatcccgaagaaatatattgttctgaccaatataaacttgcgaatgtcataaatgttaaacaaaatccagcatacataatgcgttttgaaaatatatgtggcataatttcttttcgctttaatttaaaaataatcataaggattatgcccgctaaaaagaagcgaattcctgctgaaaacaacggtggcgcccctgcttcaattccaatttttatcgttaaaaatgttgtcccgaaaataatacatactaaaatgtaattaaaaatgaccattttgcttcctcctttttactcttagaatgagtatagaggctatggtgtataacagtgtatcggtacatataacagttacttcaagttgtagttgattccctatatatttttcgctttaattaagttaaaaagaaaaataggtgaacctatgaaaattgtattgcgtaaagaaacaaacataccgtattacaagcaaatatatatgcaaattgttgacagaatacaaagtggtatgctttcacatggtgaatctcttccttctttacgttgtatggccacagatttacaaatcaatgtattaacagttcgtaaagcgtataaacagttagaaacgaaagggtatatacgcatcgaacaaggaaaaggtgcttacatatataaacgggtaaagaaagatttcaaaccaattccgtataaatggcaacaaatgaaaacgattaatgttatgcgttctcaatatgcaatgaataagcaccgtaaatattataatttttcacaagcaattctgtatcctcgtctgttaccaaatccatttttggcagatgaaatgcataaattgctggataaaaatccgatgttgttagcaacttatgggccagttcaaggcgattatgaattgcgagttgaaatagcaaattacttaaatgaacaccagaaattagtgacagacccatctcaattattaattacaagcggcgcacaacaaggaattgatttaattgctcaaacattattaaaacctggagatattgtattagtagaaagtccatgttacagtgctgcgcttgatattttcatcaataaaggtgttcaaatcattcccgtttctcttgataatcatggagttcgctccgacttaattgatgatatttgtcaaagtaaaaatcccgttttattgtatacgaatcccaccttccagaatccgacaggtacagtaatgagtaaagaacgaagaatggaacttatagaactatcggagctatatcaattttttattattgaagatgattctttcggagaaatatattttgaggatgctatagtcccgcccccaatcaaaagttttgataaagatggccacgtaatatatataaaaggatttagtaaaacgttagcaccaggactgcgtatcgcagcacttattgccgatggccctatttttgaatggctatatgcagtaaaaggttcgatggatatcggtagtcctttattaacacagaaggcacttctaccatttttacgtgcagaacgtatgaaaaaccatttagaaaaattacgtacagctttacaaatgagacgtgatttaacaattgatatattgtcgccattaaaagaactacactttgaaataccaaatggaggttttaatttatgggtgacactgcctgattcgatagatccctttaccttattacaaaaagcaaatgaagtagatgtctcttttttaccaggaacagcttgtctattaaattacgaaacaaatgataaccaattaagaattagctattcaatgttaaacgagaaagatatggaaattggattagaaaaattacacgatacaatacgaaacagtatttgttagaagtaatatcacaatagctaacaatagctaacaataaataatactcgaaaatgaaaatgtatagtatgggatattatttattgttgagctttttcgttattctgaacaaccggttttaaaacttgtctttcttttaattcttcaacaataccatattgatcaataacaattgctttcatttcctctcctccttgctgtttattttaataacatacaattatttctcaaaattttttgccttgaattaacatataattatttttgggggtaattatgcaagaagcattataaagtgaaactttaatcaaccctcgccaatcgggctttttcgggaagttggtcccctcccaacttctttactttccctgaattttaagatgggactcttactgtccagcaaatagcgggatgaattccaccacgaatcttacacacatcttagaatcatccaaaattgttttattaattaaattcaaaagaaatgaggctaactatatgagtgaaaagatatttaaaataaacggaattgatatatgtacagaaagctttgggaaccctaagaaccctgctattttattaattatgggcgctacatgttccatggtttattgggatgaagagttttgtgagctgttggctagtacggggaagtttgttattcgctttgataaccgtgatgttgggcgctctgttgcctatgaacctagaacttccaattacacagtaacagatatggctgaagatgcaattggagtactagatgcttatcatattgataaagctcacctatttggcatgtcattaggtggtatgattgctcaaattgccgctgtaaaacatcccgaaagaattttgacgctaactttactagcgactagtgtaataggatctgatgacaatactcgcgatttacctccaatggatgaaaggattttaacacatcatgtaaatggcacaagtatagattgggcaaataaaaatgatgtggcagagtatttagtttcaggatctcgtctattatgtggatcagaacgaatatttgatgaaaatagagtttataaacaagtaaaacaagaaatagaacgcgcaaacaatttattaagtatgtttaatcacgctttacttcaaggtgatgatgcatatgaaggtgtacttcaatccatacaagcacctacattagttattcacggaacagacgatacagcactaccatttgaacatggcctcgcactaattgatgaaattccaaactcagtactattaacccttaaaggggcaggccatgaaaaccatccagatgactgggaaagcataattaatgctgtttctaaacatacatctaaaatttagataaataactaatggaagggtcacaaattgtattgtgccccttccatttacaaacaaaaccccatcactgtattcgtatgtatagtgatggggacttcttatatttttctatgtttaaaaaaatggacaatctaattgatcaacagattcccataattttttttttgcattttcagtggatgtatttgtgtctagtgtcatgtttttaaaagggtttacttcgacttttaataaggatgaaggctccacatataatgagaaaacatggctgcttggtaaagctttagaaacgtcaatatctcctacttgtttaaatagttgctgtgcagcaaagaagaagaaattagttggatttgattgtttattcagccacgcaagcatttcaggtgataccgatttatgaatattgatttttactcgatcaccacgtttatatcgcctagatcgcatacttccaccaactaacttatcgttaagtttgtaaatcctaactctttttgcttatgctctctatattttggcgaacaagtatagactaataatcctcgtgcatttgtaaataacggattatctacaaagattacatttttgagtcgtcctttttgctttaaaatcatttttaaactgtttttaataattactgcacccccgccataaataaacacgtatggatcgtctttcatatcatcaattttatttataatatctgttgcaacacgcgctgctaaacctaatagcgctggctgtgattcctcaactaataatgtatttctcggatgcttatcatttaaataaatttgattgaattctgtaatgctatcaatcgttttagttggatacttccggttccatctcgtaatgatttgtagtaacgtctcttttacaccataagataaacctttacttagttgcggacggaaattcacccctaatgaaacgacttcttctgtcgtccctgcgccaatatcaaaagagagtaaagttttatctacaaaatcaatttcagaaacttgattttgctcacattctattttatgtttcacaacatttccttcttcatcgtatacaatgccccacgtcccagaagcaccctcaggtaggcatttacaatactcaattgaaacattaattgtcacatcgcgtccgttcggataatggaaaataaccttatgatttcccatataacgttttgcattttcagcagctatttcttgtgtaataagctgcataggaagagcgacagataaatcataacgaatattaatatggctagaagttggactttgacgcatagcgcttaccgccaaacctgatagtattgtaataaccattaactcatccgttgacttatttgatttcttctctacctcagtaccttttaattgatcttgaatgactttttctccaacgatgtatcgtacattatttagcattaacgatggagaacttatagtcacatcaatgtggttttctaattcagataatgaaacatctacctcatctaagagtcctgtaggctcacctatatataaagaataaatactcggaataaaaatagggtcttgccctttcaccattaacttcaaaccgttgtttcctgcatctgcaccagcttttaaaagtatagacataactaccccctaaattaatctgacatcccttccaaatatatgcgagcccattcttttacattcaaatgtattgtaattttttatttatcatagaactaaaatattacatacttacatatttcgtgtaaaaagtatttgacatgatacttttccaattttatacttatatttgtaaagagttttttacaatcgagggggcaattatttattgaatactaaaaaaactatttttataatcattgttttagcattaattgcaatactagtacatggcacatataaatacataactgaaggttctattttgggcggtacaatttttgctatttcgttaatacttagtaatttaattaattacattacttggggagatccccacggtgtatcagaagaaagtcaagatgaaatgggacaacaaattacatataaaagctttaaaattgcatattttgtgcttgtaattgtaatgttccttatattaatcttctctgaaggattttctatgggggctaatttagatggagtaaaaaacctccctctgttcatcgcaatttgctcttccttctttatttatcctattgtcgaactcgtagttgcaaaacaatataaataaaaagatgaggttttctacatgtagaaaacctcatctttttatatttacataccctctacaattgcttttaatttgttcacagtccgccaattcctaactgtagctggtgtatgtaacttctgaaactggttcattaatttagaatttcgaatgctatttttgaaaaacaaataaacgactttctcatctatatagcaatcttcaagttcacttttaaatataagcaattgactactctcttcttcagaaagtacattcgctaaaaaagcaacatgaacactttctccttctaacaatgaatgaacttcatacggacattgcttaataatatttataaattcatcatgtgttcttagcatgactggaacatcgaaatcaaattcattttttatttccgtttgtattcggtcttttagaaagtttatatcttcctcagattcgaacacgatattaccactttgtatatacgttttcacttgttttaaccctattgattcaaacactcgttttaactcagccattttgattactttatgtccaccgacattgattcctcttagtaatgcaatataaagtgtcatactattccccccacaataaaatgaacttatcaattgaatcgatttccccactcatatttctcggatatttgttttaattcttctaacatatcatgaatagataatacctcaaataaaataatatactcacttgaaaaatggtgatgataatgatttggtttataatcttttaaatcatttttataactccaagttgagatattaaaaaattcacaaactaacactgtaagaaaaactgcaatcccagttttaatcactcttcccccaacgatattccattttctatcttgatttattttttatatccttcatttctatttcattttatatacatatattgtatattattaaaataaaaaaacctactacatgaatattcaagagtaagttttctatctcattatttcattatagacaaatgcattattatttgttggcctattggtcccattcttctaaaacctttatcttggaagccgacttttgcatataaattttgtgcaggaatatttctttcattcacagcaagtacaacttcattttttattggaaaataacgttgtacaaactcttctaataataacaatgactttttagcgaatccttttctttgtctattgtgattaatagaaaatgatgttaaaagtaaagcatcctcattatctgtgaactcctttactctatctcccgtttccaatgcgaaaagacccaccggtaccccattgtaatctaaaataacaatcacattttttgtacgatcactttttgctttctccagtaatgcgcttggatctgatgtaaactgaacttgttcacttggtaaagtaaatgtttgtataacttctttatatttctccttatacggaactaattgaatttcccctgtgtgtatgttcatgctaaactctcccattttttagcttattaacttataccttgctgtgcttttgaatgcactcttccatctaaaaaggtaatttcaacaaatgaatttggattgtttcctttccaagcaaaaatttgtttaatttgtgtagaatgttctaccccttcttctataagtaaatctccttcaaaaccaattaaatctttcacttctgtataagtcatcccttcatttatactcgaaaaatgatttatattgatagactctttctgttgcctttccatcacagtagaagaagttgctgtttgatttttcacttcttttctctgttcacacgctgtcatactgaaacctaagcataaaccaaacaatatacatgcgctttttttcatcataacagttgtccctcccatcataattaaaccatatttttccttaaaaataaactgaatatttaatattatatttaaaaacctcgtacaattaagtacgaggctaatttcatttattcaaatgattatttgattgatcattctgttcttttcttaactcttgttcttcatcttttggtaattgtttatcattatccttaattggattcgtttctctattttctatcatatcatttggaacttgtggcattactcggcccacaatagcggctaattcatctagtataccttcacctgtttttccttttttaatttgctttccaatttgtttgagccgttcatacgtatcaacatctgctacaacgactgcattagcaccgtcagggtcattttttaaactttctgcaacagagtatttaattgattcaactcgagttcgatcaagttttgcttttacatcaatacctacaatagcatattttccaacaacgaccgcggttgcatcattcacacctggcacacttgccgctaaagatgctaaatgatctgctgctttttcatttggcttatttgatttattcgtataattaacatttttcattgaaacatttttttgttccggtttttcgtttggattgtctttttttccaatactgcatccagttataacgaagcaaagcatcaatatatatattagagttttcattattttcaccacttcactattaaggtttaatcataaattttttcaacagcttgcattttctttaccttttcctcggccccgctattagcattaatgaatatttggtacgtatcttttcctaaagtgcctacaaattcatagcaaagcacttcattatgcaaatcattgactactaaagctttacgttcttccatgacttttacatccggattgattttctttcttgcttctgctgcagttagctttgccgatggaactgttcgcttttgatgtgacgctaaatattcttttgcggagaacccaacgatagaaccatcatctaaagcaattttcatttggattgcttctggataaattcgtactccattttcatttactacatacgtaaatacaccaacattatcatattgagagctatcataaagctccatattattaaacttatggtcctttaaaaatttcaaacctttactacctgcatcgtttaaactaactttctgttctttaatttcgcggttattcataacccaaattggatatccgccttttccggtaatatccatatagaactcattattcgttgcttcatctttaattttcacactatagaaggattctttcgcaccttttccgcttttctctacatctactttttcatttccttttaaattcagaaacgattttgcgattttcgccgcttcatctttagaaattgcctttccttccgcttcaaatccgccttttttatttttttgcgcacttgtaaaggtcggtccgaagtttgtagaagaatatgatgttacgtttttctctacagttttcaatccatcaataattgtgttatctgctggatcgcgatttgatgcaagtgccatttctacatccatccagcgtaaattatttttcaaaacaagatgttgtacttttcttagttcatcttgtatatttcctgcatttgaatataaagtttgtagcgttttatattcttgctcatttaacggctctttttctaaatcacgaatggctgcacggtaactgaaatcaccgatattcgctaaaaattcttccgttttattaaatggcattaatgttaaaggaagttgccctacatccgagcgagcttcagatgttaaacgccatacatccgctaatgcaggtgataaagatgatcgtgaattcatcgcaagtgttgtgccaattttatcgtgtaataaatcgacttcgtatgctaaatcatggaatgcacgttgatagctattttccgctcgaattaaaactgcatttttctcttggtgctctttatagccccaatagcctgttcctactacaccgactgttaataatacaatgataatacctcgtaacattgtcccacctccgctctatttacagaaaatatgtttaccgatttttttaatttgtggacgagtccaaatccatttactagtcgcagtatctggattgaaataatataaagcatttcctgttggatcccatccgttaatcgcatctaaaactgctttttttgctgtttcatttggcgttaaatatatttgtccatcggctaccgctgtaaatgctctaggttcaaagattacacctgaaacagtatttgggaatgacgcacttgtaacacgattcaaaataacggcagctactgcaacttgtcctaaatacggttcaccacgcgattctccgtatactgcgtttgccataagctgaatatcattttgagaataaccgttcggaacatttgtccctttattttgaagtggtttattctcttgtgcagtgccaccgctatttcctttattcgttgtcgtccctttattagcagttgacttgtcatacttcgttgccttcacgagcatttgcttcgttttagctccagctaaaccatcaacgggtaatccgaatttctcttgaaaattccgaagtgcccaatatgtaccccatccgaaaacaccatccacttttcccgtataaaacccgttatatttcaaacgagattgcagttcaatgacatcttcgccagatgctcctctttgaataacttgattagaaaaagcctctacattctttaattgtatactactgaccattaaagacagtcctatgaacgcaagtaaaactgctattttaaaaatagctttttggcgcataattttccctccttaattacggaaatgatttcttggttatgttttgtaaaagcctcgcttttatgtaaagaagacaaaaaaatccaaactaatatcgttgaaaaaatatgtaaacaatataaaaaaggataaaaggagttcatcatgaaaaaatggttaaaacgtgtcgcacttgtcattctgttcctaacaacatgttcaaatatatatacaggctcatcaattgttcatgcgcagccgccgtatgccaaatggggtaaacttgccgtagaaaagacgaaagaacaatacccaaaagcagaaattattgactatcttcatataggtagaaaaccaaaaacagttcaaataactgttgaaaaatttaaattgtggttacgtgagaacggaaaagaatacggtgtttttgttgatgtagaatttgaaacgaagacggagaaatttataaagttgtcgtttcagaagacgagtagataaagtgaaaccttaatcagcgggggttttgttcatctcccactaatcatcagccctcaccaatcggacttttacgggcagcccgacaaatagctggataaagtgaaacccccactgttaaaaacagacacagtggggttcttgcatttctaaaattcttttctaaagtttcgattccctaaaaatcttaccaatatacaaatagcaccaattacaactgctatccctatactgtataaaagtactttaccatatccacctattctcggatctaaaaacggatatggataccaattcacgattggaccacgtattaagctatatacaacgtaaaaaaacgggaataaaagccaacttgcagcttgtttccaagtgattttcttaataggtggatttaaaatccaatctaaaagcattataatcggcatgatataatgtagcacagtatttacccatggtattgccgtttgaagtgactcttctaaccctcttagtaacaaaaaataaacgagtcctgtcgtaagtatatataccgtcgccgcaccacgaagtatactaaactgctctgagcgaccaaatgtagctgttccgatactacttaaaaggagaatacatgcaactaaaatgttactttcgatagtaaagaaactaaaaaagttaactggattgaacggtttcacttgtgccctgattatgaattgcgtaataatggcgctacatactagaagacttaaacagaatctaaataaagataaaattttttcatgcttcatacattccctccttttcttatatataattagaatttccctgtacatgctcaataaatagttttaatggaacgagcccacgttttggcatatgactacttataatagctactacttctaactgaggaatgataacgatgtattgtccgccgtatcccatagcgaaatatatacaatacggtatgtgaaatctttcggtatgtaatacccaccagtgatatccatatgcgccgacatgttcatatgtttcaaaatgcgccctacttgactcttctaaccatttcgctgatacaatttctttttcattccaatatccattttgcaaacataattttcctaattttaataaatcggtagatttcattttcataccgaagccgccgacatatataccctgcggatcttgttgccactcgtattcgttaatttctaatggattaaataaatatttctttgcaaaccgctctgtcgacattccagtagcttcttgaataatatagctcagtaaatgagaagaacctgaattataattcatttttgtagcaggttcttcaattattggcttttctaatatgtactgtacccagttctctgattctacaaagtcatttgggaatactactccattcccaaactctttccagtcctcaccagtagtcattgttaataagtgatatagtgttaaattatgttttcccctaggtacattttcaatccactctgtgatcggtgtatgtatatcatttatatagcccttatcaactgcaataccaattaataaagatacgatactttttgtaatcgaatttattttatataagttatttgcacattcgggtgttttataatactcagttgttaattgtcctttttgataaacaagaaatgtattcacttttttcttttcgaatttattttctagttgcttgaaatccaaaaactttacctccatttaaatagttaatccatttattatatcttgttccttcattttaaacataattgtgctcaaataaaaataaacctgtcagccataatgaactgacaggtttatttttataatttcgtacgaacattccaaagctctgggaagaattgttgatcaagtactcgctttaaataagaaacaccggaggatccacctgtacccattttatgtccaataattctttctactgttttcatatgacggaaacgccattgttgtagccagtcttcaatatcaatcaatttttcagcaagctgatataaattccaatattttttcacatccgcatacacttctaaccatgctgcttctactgttgcatcttcttcataaggctgcgtaatatcacggtttaacacatctttatgaatagggaatccttcttttactaatgcttgaatcgcgacatcatatagacttggtgcatgtagcgctttatgaagtcgtgcatgtaattctggatccttttcataaatttttaatgcatgtggcgttttatagccaagtgcatactcaatcatacgatattgatacgattgaaaacctgaagcttgaccgagtgaatcacgaaactcaatatattctgatggtgttaatgtcgcaagaatatcccaagattgaataatttgagactgaatttttgatacacgtgctaacattttaaaagctggttgtaatttatcttgtttaatagattcaatcgccgcatttagctcatgtaaaatgagcttcatccaaagctcacttgcttggtgaataacgataaataacatttcatcatgatggtctgataatcttttttgagaagatagtaaactatctaattgtaaatattccccatacgtcatattctctttaaaatccgtatgaatccctttttccataattactttttcattttctttcatattagccaaacgccccttttatatgattctacttatattggtctaataacggctcgaaccggacttccatccgcatcagttaatgcaagtggtaatgcaatcaattcataatcaccgtctgctacatgatctagtacgacattttctaaaatatgaattccatgtttaaataattgatgatgcgctgctaattctttatcatctagcggatcaactgatggtacatctactccgattaaacgaatacctttctccgaaagaaaaggtgctatgtctgcacgtaaatgagggatcacatctggaaattcttcagcttttccatgtgaagatgtacgtaataataatcgttctacaccttctaaatgaaagctttctaattcctttttcccgatgctttcaagattagaaacgtcaataatccgtgctgggccaacataaacttgaacatctaaatccaatactttctttccatcattatcaaaatgaaatggtgcatcaatatgagtgcctgtatgaatactcatcgttaactttccaacatttaccgagccactttcttcttttgaccatgaaacttcatatgagaacggtgtgtctcctggccacgttgcaatatcattatttagcggttgtgaaatatcaatccactctgatgttttcatgcttatgccacaacctctcgcttattttcaaactgtttatactcttcttctttcataattttctttaatatttgtacagatttccacacttcttcatatgtgttatataaagcgaccggcgccagtcttactccattaggtgctcggaaatcagggataactccatttgcttttagcgctttacaaatacgtgctgcttctgcatgttctaaatatatgtgcccgccacgtttttcatcctctaatggatttccaattgtaaatccgaaatcttttaattcgtgatcaattaaattcagcatatatcttgtaatatgtaaagatttttcgcgtaaacgttcaataccagcatctttaaacatttcaagagaaccaattaaaggtgctgtacttaatacgtgcggtgtaccaatttgataagcacctgcatgatcggcagctgttaatgtatgctccatatcaaactgtttatcttttctagaactaaaccatccagacaatcctggcagtctattaaaatgtttactatttacataaaggcctgcaacactacccggtcctgcatttaaatatttataattgcaccaaacagcaaaatcgacatcccaatctttgaaatgatgcggaatagatcctattgaatggcataaatcaaatccaatgtgaatgccgcgtttatgagcttccgttgttaaacgtttcatatcaagaatttgaccacttctatataaaacagaaggtaataaaattaaagcgatatcatcttccagcgcatggataatatcttcttcagaaagtgttctaccatctcggcttttcactcttactaaatgctcctctggatctaatccttttaaacgaatttgactttgaagtgcataaatatctgatgggaaagtcaattcatccgcaagtatttttgtacgtattcctttcggctcataaaacgtcgcaataacttggtgtatattcgcagttgtggaaccggttacaatagtttcttccggtaaagctccaataagaggggctgtaagtttacctaatttctctgaaaggaaaaaccacggatgctcaccttctgtccagccgtcaataccatactctttccacgaatctagcaacgtaagtaatgatttctctgctctttttgaaagtagccctaatgagtttccatctaaatatatagtaccttcttttttatagaattcagtttgaaaatctttcagttcatcatgtttatcacattcaagcgcatactcataagttggttgaaatggttctttatacatggtgtcaccttctcttaattttctttttattctaactaattgaaatatatcaccttaattgatacaacgtcaatgatattatgtcagttgactttatatatgaacttcttttacaatacaattatattttcagatatttcagtataaagaggtgattctttgaaaaacagtaccctttcatcaagaaaacaccgctccttagaaacgaagaagaaactattacactctggttacactatttttatacgtaacggatttcaaaaaacgacaattacacaaattattaaacatgcagaaaccggatatggtacagcatatgtatacttcaaaaacaaagatgatctcctaattagtttaatggaagatgttatgaatcgtttttataatatcgctgaacgctctttttctccacaaacaaaagaggaagtacgtataatgatccaaaatcaagttagagcattcctgcaattagcagatgaagaacgcgctattttgcgagttgtagaggaagcgataggattatcaagagaaatacggcaaaaatgggatgagattcgggaacgttttataacaagcattaaacaggatattacttactctcaagaaagtggattagcacaacctaatttaaataaagagattgtagcacgcggttggttcgcgatgaatgaatcgtttctttggactattatgcaaaatgacaaaaagattaacttagaggaaattgtgtatacgttaacggagatgtatacgaccgggttatataaatagcacaccttcaataaataaggtgtgctattttacatctataaaaatatattatccgggtatggtagtgctaaaggaggcttttcagaaaatgagaaatattgtagttttaaagattcaccatctatcgatttcagttttccactagtaatttcacactcaaacacaacaacaatatattctaccttatcgccatttgcatatgtataacgaaactctttccctccaaatacccctttttgttttttcacttgtactttcaatcctgtttcttcccatacttcccgaattactgcttcttctggagtttccccaggttcaattgctccagccggcaaactccaatattctccgccaggatattgaaataagagttctccctgctcgtttttaataactgcagctacacttggcatgaatattagttcatgtcctaattgctcccggatttttttataatatagcgacatcgacatataattctctcccactccattaatgaataactgtattttctgacatatattctataataataccaataacaatttctatatagaaaggataagaaaatgacccaagtacaactagtaaatagcttcctatcatttttaggaacgacaaaacagcctactagcttaaagtttttaaatgagcttattaaagctcatcaagaaaaagtaaaagaaccaatacacttatcaaatatgaaagaacttatttcaaggtctaacgattggcatacatctcctgtattaaagaaaattcagattttcggttatatcgatggtattccaacttctattaatgataatgttttaaaacgatatttccaaggtaagaaaagagaacaaatcattacatcttctgaacttaattattggataacagaaagattttgtgttgataaagaaatatatgaaagagctattgagattttcaatgaaaaatcttcaaatagaatattacaaacaagttctttaatatctttaggctgaggtaaatagctagttgaaggagcaatttcaaaattaaagcttatatatccacatccagttagccacatatagtgacatttcaactcttcatcgaacatatatttcacaatatctataaataataaatctcctgcgtattgcaacagaaactccatattcgagctacaagtataataattgtcatcgtcatcaagattttttatattatattccgccaaatcccataaaaatcttcttttaatatatttttaatttttccaacaatgcttatcccccgaattttcccaagaataactctctaatctacttaaaataatttcagtaaattcttcagcaatgtccttagaaatctcaccacgatttccaataatatcccaagcaatactaattgaagtccatctcatcaatgaattcttttcaaattttaaaaactctattatttcctcctctttcatttcacttagaattgcttttaattcactttcttctaatttacttctttgattataatcagtttgatttagtatttttacatattccttactttcttgataaaaaacaatctttacttgttctggtgataaatccgctaatagtttttcaatttcttcagcgcctatttctttacctttatttatacatttgaaataacatcccattttaacttttcattaatttcactcataagttggggtattactacttcaccatattttttaaaacattcatgagttccttcgtaattttaaaataaagtttgattaaaaatatcgttttaacccgtattctatggtaaataaaaagaatccattttgaaaaagattgatcaaaatggattcttatccagcaggtttatgttttggttttataaaaaagtttgatcattttctatcaatgaaaacaattaattgactatttttattatgaagaggtcggagcaggaaattcatcaattttgatacgaagtaaactataaggtttctgtcgtaagtcttttccataatgaaatctaggctgtcgatgtaattggttcacaatgacatacaaatattgatccggaccaattgaaaaagtatccggccacaaaattctcggatcatgtgcgatagcttccattatgccatttggcaatatcttacggatactgttgttttcataatctccagcataaacagctccctttgcatcggtgatcattccatcagacgcacctttttctccccaatactccacatgataaggtaaattcatgtccggtatcgttctgtctctcaaggcttctgttgagatcgagaacaaatgccgactggttagtggagcaaaaaataatatctttccatcgggagaaatcgcaagactatcagacgccaacctaaatggagaagttgaaccgtctttgtttcgattcattaaaatttgaccttctactttcggtaaaaaatagggatcgggtgaagttgaatttgctccatttaaccgtctaaacgcgtttccatttgataaatctacgacgataatagctcctggtcctcttgaagaagaatccgttatataggcataacctgcttttccaacacgaaaatcaaaacggacatcattcagataagttgtaggcaggacaacatcttctgtaaaggtatatacttttcttattgtattggtttctaaatcaacagcgactaattttgccccccctttaataggttcagaaaaattgggtgccgctgtatctaatatccaaagcgttccccttccatcagcaactacactttggacactgatgaaagtcattgggatattctcgggattaaccaaattggtttgtaaattaggataaggctgcaatttatcctcaaaaatttccgccaccgtaaatttaacatcgtctccccatttcggaaagcaaatgaaaatacgaccggtttctgaaacagtaacacctgtaggcatagccccataaaatgcataaactagttctaaattaccgaaatatttttcactaggtaacataggtttcataatatcctcctcaagcattcaaacgggatatctcctatatatgatttatattttttctagtgcatgtttcttaataagtttttctatacgaaaagatgattgaattgattgttttcgaaatttaataagtctgtcagaagaaaggaaacattttaatttaaaggtctccagatgaagtagaattcaattagcaggtagcgaagttcaacattcccgaatcaacgttaagctggtataaaaaatggggaaatatccccctttaaatttgtgaaaaaatgtacttaagctaaactgcccgttagtttaagtgtagcacttcacaaacaatcttttgagtattcttattattcctgtttcctcaacaatctggccctttaattgaacaatacaactgaaatttaaggggcgaaagaaaaatcttatattaatacagggttttatcaatcttttttataaattatcaaactttattttaaatcaataccacactttattccatgttccatgagtgactaacgggtgctttgaacaagaaaataaaggtgagtacatattatacatgactaatatgcgctcacctttatttttttaggatttttagcttttaggtcttgataataatttttagtggttttattaacaatttatatttagtaaaattgctttttatgaatttaatataagtccaaagaatttcctggtcaatataataacgtatatcagcacactttttctttattcagtctacttacaattccaactataaatttatattcaatcctcctcttcttagtttttttaaacccttctttcgtatcaaaaataaaacacgttttccgaaaccaaattcgtacatataaagactcaaaataaataggttttataattcctcgttcctcaaattcagttccatctttattttcagtttctgttcgaacgaaccacctatttccgaagccaatttcaatatacttcacataagtccccctttcggaaattaatttctaactgttctattatttccccggtaagcgcacattccgacagaacatgagcccacaaagaaaaagtagattgcaaaaatctactttataacttatatttttgcattcgtttataaaatgtactacggggtacatttaatagttttgcagctaacgaaacatttccatttgtcttttgtaatgcttcaatcatgctatcacgctgtattttttcgcgaaaatgtaatgtatgttctgttttattttcaacttgtaactcaagttgttgttgatttcccctcattgtttgtaacaaaaaatctacttgtttttcgcatatttcccgtccttgcgacaaaatgtaaatgcgttctaatacatttactagttcccgaatatttccgggccatgtatgttgtaaaaattgattgtatatactctttggaaatacaacattccaattcttccgttcgcaaaagtgttgtataaaatatgggatatcctcttttctttctattaacgatggaacatataacggataaacgtgcaaacgataatataaatcttgacggaatttcccttcttctactaaccgtagtaaatctttatgtgtggcagtaataatacgaatatttactggtaccaattttgaactcccaattggagttattgtgcgttcttgtaaaacacgcaataatgctacttgcatctctggtggtacttcaccaatttcatctaaaaataatgttcctccgtttgcttgttcaaatttccctttatatccttgacgtcgcgcacctgtaaacgcaccttcagcataaccgaacaattcactttccattaattctttaggcaaagaaccgcagttaacagctataaagggcccgtcttttcttggactattttcatgaatcgctctcgcgacatattcctttcctactcctgtctcaccacatacatacacactagcatcagtcggtgaaacaagcttaatttcttctagtgtgtgttgaaatgctctgcttgtcccggtaactcctgaaaaagtaatcccttttataaatgtgagagcagaatatgtattcatttgtttattttcctttaaatacatacatttcccaatcattctttcattactatatactggtatctctaatttagtttccaatccatggtgcattaactcttcaagtttcattcttgaccaattatttattcgttcacgaacgctcttactcgcagaaacgataacatcacgatgattacaaataactacttgttcatcactatcaatgacatctaaaaaacgatggattaagtgtaattcattttgatgaactcttatgctacattcacgttctatcgcatgtgcaattgaagttaccataccgagcatatatggatgcgaaaattcaatcggacacgagaaatctagaacaccaattaatttcccatcatcattatgaatgggagcagccgcacaactccagctatgagatgccacggtgtaatgttcagtaccacttatcataatagcttcttcaatttctagcgctgttccaattgcatttgtgccaacagctgattccgtccattttacaccttcaataaaattaatatgtttcgctcgctttaacgtttgtttatttccacttaacgatagaacataaccatctggatcgattaataatgccatcatttgtagttcatcaatggtttttctcatattttgtatttgaggtaatgcgatatcaaggaaaatttcactctttttcttttgttcttgaaaaatgttagaagacaaaattttctgacctttattcatgtgaggattaacattagcctgtttacatcgatgccacgattctgaaattctttgatttatgcgatttgaatcaagaacaccttcattaacaaactttttccatgtatgtaagtaaaacggtgaagctaacattgtatcatctcccttttaattgttttggagatttataaaacatacttttattataaaactgaataaaagcgttttcaatacaactagcaagacgacacaaatatgttaataatttgaatatcttaatgcacttctttattcttttttagtagcactatattttgtataatggacgcaaagaaaatacataaccaaaaccacttttgtggattaccatttataaagaaaacaatcacggctattgcaaataaaatagtggatgctaaactaaaatataattttgttttaatttctcttatccctcacccctctgctactttacagtacatactaactcttcatttttcatctctactatgtactcctgtaaaacatattctttcccgccatggttttcataccattcatgtattcctttaatatgcctctcgtcacttctaattttcgattctatttcattatactgttcataactatcatattcccatatggcaaatacttcagacgtaccattcttattatctttcatccagcgtcctattagcctagaaccatgctttaattgattaggtaagttcgtgtgattgaaatgatcattaaatacttctatgaattcatttttcactacatagtacttccttctgtaaaacatacttcttcacctctttcatgaaaagtattagtaaatcttcccatcactaccgtattataatactttccatccgatagtcttttgtcatttttcaaaatgccttctacttcaaaacctaattttttataaagatgaatagctttctcgtttgtctctaatacttgtaaagatattttatttactgcattttcgtcagcccatttaatagattgttgtaataggctcttccccattctatatccccaaaactcttttaaaatacaaacgccaaactccactttatgagataatctcttaaaatttgatccttcacatcttgaaaatccaacaattcgattgtgcacttctacaactaaaaagagattcttcgtttcttcactatctgtttttattattttttgaaaccctaggtcatctataaatccctctccagcatctctatccatattttcagtttctccatcaatctgaactctaattttcgataactgctcagcatctttttcagctgcagaacgaattgtataagttaatccatttatatgatactcttgctcttttacaatcatgtcaaactcctttcaaatcaatataatggcgctattacaacttgtttaccttgtttctcaaattcctgaacagtttctttactagcctcttcgtcagttataataaggtcaatttcttttagagactctcctcttataaaacaatctattccaagtttattatgcggagctaaacaaatatttcttctagcaatttcacttactcttttactaaaataagcaacttcaggtgttgtgcagtactaataccttgtaatgaaatgcctccacctgtagagaaataaagatcaatagaaaatctacttatcaattcagaggcaaatgtatcagtaatatttcctgaaggctttacttttccaccaattaaatatgtatcgatgttcttatattctcttagatgaccagctatttctatagaattcgtaataaccgtaaatgatacttccggtaaatatttcagcatcgcattatgaatggaagccccgccaataaaaatagaatcatcttcttgtatataagatgccgcaacttttgcaattgtgttctcatatattgagctatcactataacgtttagctggttccgcagctaagttcctcactcgcgtaagttcaattgcacctccgtgcgttctttttaataaaccatccttttccataatagacaaatctcttcttatagaatcaatagacatttcaaatctttccgcaagttcctttgcgattactcttccatctgtattaagtagttctaagattctctctcgacgttcttcagtaaacatgttatcaccaccgttattgaagattcagaaacttaaactttattttaattatatgtatgcctcttctgttttacaatattttcagttcttatttattccgttttatacagtcttctcccgctttctatcccattaatttgccaaccgaataaatgtatatctgtatattacgcaaaaatactttcatttaccttcctgttgatgtaaaattattcctatgttttactttttaatacagaaagggattactatgaaatcattaatcaaaacgacatgtacagcattattatttactggaatattaacaggatgtaatagcaatactacatcaaaacaagaaaagagcgctctcgaaaagaatgcaatgcactatggagaaatagttaaaaacgaatactatagagcgacagttgaaaatgcaaagtttgaaaaaatagacaaagagcgacgccttactactcgtgttatgattaataatgttcgggacgatggacaaactattgatctttcggaaataaaatatttcatacaagatgaaaaaactggtcagaaatatgaaggtgaagctcatccgatagatgacgagcactataaaaatgttccacacgaattctctttaactactgacgttgtgtttgaactgaaaacttcaccaaaagatttaaataatatgtatttatacatagatagcaaagcagcgccgttaacagatacatattggaagcttgataatttagtatctaaatagaaagaccagtcttacatgactggtcttttacattcatacatttaactttcattaacacttatattcattttctaataacaacttgaataacatcagctaaaccagtgtgccctttcccttcaattcgctcttgttcgccattaaagaaatgaattaccttatgttcttcacaccaagtaaggatatcaattggatcatacagcatatcaacatcttttggtccaccagtactatagtttatttgtttttttgagtaaacttcaaacataattaaaccaccaggctttatcgtttgtatcattttacctaatatcatttttttataattatcatgaaaatgtccaaataccataattgctacatcatattcattttctggcaaactatcagctaataaatctactttttttgtatgcacgtttacgttatgcttctctgccaatttttttgtcttctctaatccatcttccgaataatcaatagctgttacttcgttcccttgtcttgctagaaatacagcatttctaccttctccctccgcaaatgctattactttattgtgatttgctaaacgaaatgcttgttctttaataaatgtattaggttcttccccgtaaaaatattcatctgatttatatcgatcattccaaaatttagtcatcatcttctctccttcttcatatcattttctaactacaattaaagatatcgaagagtctttttatccttaattaatttaaaaataaaagcagattaaaaatccacttttatttttttcgcaagatctacgattttttgatttcgtaacttttcttccattttctcttctgctgcaagcattacttcattaattaaacatccaggtttgtcatgtaaacaacattcaaacaatgatgttttaccttcaattgcatgtataatatctaaaaatgaaatatcttcccaattcttactaagcgagtaaccgccctttggaccagatgatgaatgtatcatcccttccttcgtcaacttagttagtattttagacaagtacgttggtgaaacattttgcatttctgctaattggtgaacactaactaacttatttggtgtagcctttgccagaaaaagcattgtatgaagagcataatttgtagctttagaatatttcataatacagctcctattgtagacttcatgtatctacaataactttatttttttattatgtcaaacgtttgtaatactccatacaacattatttcttcacaagtaatacatctgccgcgaaaatcgtcacttctctaaatggagagtcaaataaaacacctagtttaaaaccatcttcagtaagagctatttcatgatataaccaccaagcattttcaaagttttccggcatagaacactttgttactcctataaaggttacttcaagtaagtcatttgattatttaaaagtggatgaacaaaatgttaattcatttgcaaaattaaatgatcaggataagaaaaatatccaaattactatggtattaccagagcaaaatgaaaatagggattggctagcttacggttttactagtcgtgaaacattagatgcgtatattgaaaaggataaaaaagcaattaaaaataaaattaatcctttaggtagcggtgctggtagtactgatttttatgaacataaagataaaggtggccaatatatttactggagcagcggatttaaaaacttaccatctagctggaatgacagaatttcttctgtaagtacagcgtcaccttctgcaagttattcaacgacactttgggagcacacttcaacacaaggatatggaaaaggcgttttatttaaacacgctgattggtacggtaaaactgctaatttagctgctgattggaacgatattacttcagcgattgaaattaaatagtaataagacatttaatttcttctataaaaattcaaaccactattctctctttcatttagagaatagtggtttatcatatttctatttaagcatgtacagcatgtcctactgcttgcattaacgcttcatgaatcgcctcagataaagttggatgtgctgcaatataatctctcattatatcagcggtaacttctgtatgaatcattacagttccttgtccaatcagttcagtggcatgaggaccaataatagaaatccctacaatttcttggtatttaggttccacaatgacttttactttacccatttgttcgccaataataagcgcttttccgtttgctgtaaaaggaaattctccaatttgtatgtcaccgtactgctctcttgcatctttttctgttaaaccgacactagcaatttctggagctgtataaatacagcgaggtacagcatggtagtttacttttacatcttctccactcgcgtgtaatgctgctgtcgttccttcatggaaggcaacgtgagcaagctgaattccaccgatcacatcaccagctgcgtaaatatgtgatacgttcgtttgcatatgttcgttcacagcaatccctttatttgaaaactgaacccctgctttttctaaatctaattgttgtacacgtggttttcggccgacagaaatgagaacatattccgggttagcttcttggatactaccttcatattcaaatgaagcttgcttcttataattatttaatccttttaaagcagctcctgtaaatatttctacgccatcactttctaatttctctcttaaaatatgtgcgatatcttcatcttcacctggtaataattgcggtgccatttcaacaatcgtaacttttgtcccaaggcgactataaatacttgcaaactcgcatcctattacaccaccgccaacgattaacaatgaagatggtacactctcaagagacatcgcatggctactatttaaaatccattttccatcaaacggagcgaatggtaattctgtaggttcggaaccagctgcgataataaacctctctccatccactacttcttctttatttccttgtacaactcgcacacgatgatccgtttcgaatttcgcttttccttttacaactttaattttatttttcttcattaaatattgtattccttggacgagttgcattacgatttgtgatttccttgcctgtatttgatcccaatcaattgatatacttcctgtattaagcgtaaccccataatcattcgcttttctcacaatgtcatgcacttctgcactttctaacaatgatttcgtcggcatacacccaacatttaaacacgttccgccaaggtcagcttcatcaataagagtgacctcttttccattttgagccgcggtaattgccgctacatatccagctggtccgcctccaattacaactaatttactcattctctcaccttctctttataaaagaattgttataggttcttctaaataatatttaattgtgcgtaaaaatgcagctgctggtgcaccgtctagtacacgatgatcgaatgttaaacttaaaggtaacatactaccttttttaaattttttccctttatatacaggaacatgttcaattgcgccaatacctaaaataccagtctcaggtgtatttaatacaggtgtgaaatattcaataccaaagctacctaaattactaattgtaaatgtcgttccgtgcatatcatcactacttaagctacctgctcgcgccttttgtgccatatccttaatctctttagacaactctactaaagataaattatttgcaaagcgaatagctggaacgactaatcctttttctaatgcgactgctatgcctaaatgcacatgttcaaattgatgaatggcatcatctatataagcgctgttcatttctttatgctctctaagcgctaatacaacagcacgagaaacgaaatccgtaatggttagtttgttttcgtatcgtttttgcacaactttcgctatgtctttatgtaatgcaactaaatctgtaacatctactttcatcgttaacgttaattgcgcactattttgtaagcttgcatgcatacgactcgcaattgcttttctcataccagtaacaggaacgactgtactttcttcttgttcaggtacttctggatttgctactctttcttctagcgcctttaatacatctgcctttgtaatccttccgccaggacctgtaccaactaatgccttgatatccagattttcagactttgcaattttcttcgctacaggtgaaattttaattctttgcttcgctacttctttcccatttggttcttgattttgtacttctatattagatgttttttcttctaccacatgtgtgctttcctgcatttctactttttcatttggtttaccgatgtagcaaattacagtaccaggcggcactccttcatcttcacttacagctatatcaagtaccgtaccatcagctggcgcttcaatttccgtttcaattttttctgaattaatactagcaattagttctccttttgctacattatcgcctgctttaatattccagctcgtaataataccttctttcatcgccatacctaacttcggcattacaacttctacagccatgtgtctctctcccttctcatcgttttattacacatgtaataaagattggtctccaatcatttctgatacagtttcaattactttttctggcgttggcaaatacaacttttcaagtggtggtgagaacggaacaggtgtatgtggtgctgtaattcgtttaataggtgcatctaacaaatcaaaacctttatccgctacaattgccgcaatatctgttgcgatactacatcttggattcgcttcgtcaataacgataagacgatttgttttttcaacagatgataaaatagtatcttcatcaagcggtgataaagatcgtggatcaattacttctacttcaagcccctttttcgataattgctttgcagctgcaagtgctgtatgaacttgttttccgattgcgacaattgttacatcagaaccttctcgtttaatatctgcttttcctaaagaaattgtataatacccttccggcacttcacctttcatattgtaaagtgttttatcttcaaagaagattaccgggtcgtcatcttcaattgccgctaataataagccttttgcgtcatatggagtagaaggaacgacaacttttatacctggaatgctcgtaaataaggcatacaaactttgtgaatgttgtgcagctgcgctaaaacctgcaccgtgcatcgtacgtaccgtaactggcactttcgctttaccaccaaacatatagcggaattttgcaccttggtttaatacttgatcaagacaactaccaataaaatcattaaacattaattcagctatcggacgtaacccagttgcagcagctgccatcgcagctcccatataacccgcttcagaaattggtgtatccaatatacgatttcggccaaactcttgtacaagtcctttcgtaacaccaagaacaccaccccaagcttcatcatcttgcagatgatcaacttgtgcaccgcctgcaacgtcttcacctattaaaattacattttcatcacgacgcattgagattttcatcgcttcattaattgcagttgacatacttactgttctagtcataatttttcaccctcctcttatttgtaagaaacgtatacatcttttaataattcttcatcgtctgggtatggactattttcactaaattcaatggatctttgtactgcatcatctactgctttttccatatcaacaagttcagattccgttaataaaccttcatgaattaaatgcttacggaaattcacaatcgcatctttttcatttaaatgttcttctttttcttctgatgttttatatgtttgcgcttcaccttcaaaatgaccgtaattacgatatgtcatacattcaataattgttggaccatcaccattacgcgcacgttccactgcttctgcagcagctttatatacagctagaagatcttttccatctacttgaacgcctggaatattataagcttttgcacgatccgcaatagaatcacaacttgaagcatattcaaatgtagttgcttcaccgtaaccgttattttctgcaataaaaataactggtaacttccaaatcgccgctaaattaaccccttcatggaatgttccttcattatttgctccgtcaccgaagaaacaaacacttacatcttttgttcctttatatttagctgtcaatgctgaaccgcaagcaagtgggaaacccccgcctacaatgccattagcaccaagcattcctttatctaaatccgcaatatgcatggaaccgcctttacctttacataatcctgtcgctttcccgaaaagttcagccatcataccatttaaatcacaaccttttgcgatacaatgtccatgacctctatgtgtacttgtaatactgtcactatccgttaagtgggcacatacaccaactgctaccgcttcttcacctgcgtataaatgaacgaaacctggcaaaacgccttgcgcgaacaattcatgtaccttatcttcaaacttacgaatctctaacattttttcatacatccaacgagcttgttctttcgtaatttcattccctttactttcagttgtttttaacatgtccagccctcctattttcttgatcatcttttatattgcaagtaccgtgccaaattctaatccttgatttaataagttttctcttttctttcataataaaaaagtggacaaaatgagacatctgtctcgttttgtccacttttgttcacctaatttgagaactattattttattcattatcaaagctccgctgtaattttcggatgtaaataatttggccaatatgatatgcattatgagttgttacattcgctaacacttcccaccactttgcagaaacaggaaatcctactacatcactttcaaccttttcttcatttataagattttgccattgtaacagtttttctagtagtttttcccgtaattcatcgaaagtttgattatctgaaagcataaaacttttgttattatctccaatagcgggtactgcattcacatttgattctttatacctagtttgccacgttgagttccaatacagtaaatgttgtacaatttcagctatactattactctcttcattcggtttccagaaagcttctctctcagatagatctttcactgcatctgaaaatggaatataccaactgggatcgtttgcattcgccaacaattgatccgctaatacatccttcacatggaccatttttcttccctcctgttaaaaagattcatttcatgacaatactcacttctctaaatacgctgagtttgtaagatttcctctttttaagcataaccccatacatatgcacataaagaaaccgaaagcacctaatacataagctaatgcataaccacttctcccaataacccagcccgcaattccaggtccaatcatttgcccaactgcatagaaaacagatataaaactaattgccattgagacatatttcggagatacttgctttgaagctgcaacttgaattaataatagtatacctccgaggctagaaccccaaataattgccgacacgataaaaccagttatatttccaaatataattggagccatatcacctataatagctaataaaagcgcactacataaactcttctttataccaattcgatccgaaataaatccccagacagatgctcctacgattgaaaagatgccagcaattgcataaacagtccccgaaattgatgctgagataccactatcaatcataaaactagtttgatataaatttggaattaaatatacaacaccaacaataaaatacatccatgcaatgatatatagttctttcgttttccataaaaacgatttattactcattttttgctcatcttcagtaacttctggatttttcaaaacaactgaagcgacaaatacaatgatacatgtaataactccaaacaaaaaccatgcaccacgccaactatactcaggaaatgtgcgcactacataaggaacaattattccactaaatagcatacctatacctgcaccgcttaataacagtcccattacagttcctcttttgtctggaaaccaccctaccgttattgacatgagtggtgtatatacaagagcactaccagctccagcacatagcatacaaaaagcaactatccaaaacgaagaaacaaacgctaatcccattaagcttataacgacgaaccaactgcctattaataaaactgattttgcgccaaaacggatagtaaatattccagatgttcctacagttaataaataacctaaaaaaagtatggttcctagcatacctgattgagccgtagataagtgaagtccttcctgcataaatggcagtataattccatatgccatacgggcgaaaccagttgttgttataataagaaagattcctattaatacaaatatccaaaaatgactttcattccgctctttcatttaaattcctccataaaaaattatttccaattggatgttgattgtaattataatgattatgacgaaatacaactaccaaatggtggaggagtttacggtataacggatttttaatacatacgcaaaatttcagaaggtttcattccatatttctttttaaatgactctgaaaaatgactaatattattgtatccaacagcaactgccgtttcggtcacattactagttcccgaacgcaataaaagcattgctctttccattcgctgttctcttaaatatgcaaatgtggacgtgccaaataattctttaaaaccaatttttaatttataatcatttaatcctactattttagctaattctaataatgatgggggtgactccacatgcccatcaacttaagaatttgcactacccccaagtgtcaaaaaacgttattcataaaaaatgcacctccaattgttagactgtgtctaacaattggggtgcacttcaaatgaatagaggactttttccaagtatattctattttaaagttcttacttatcttttactttaaaagatattgctgtaacttctttattaacagttccatcccgtttggacttacaataatcttcccattcgctaacgaaatattgctgtctgaaatatctcctgtaagtgcacaagctcttggagattgatattttcgtaaaataatctgatcctcttctataaacatttcaagagaatctttttctacaattcctaaactccgtcttatttccattggaataacaatacgccccatactatctgctttacgagtaattcctcttgatttcataaaatgccaccctttatatttatctaatattacggtattcattttagcaataaacaacaattaggaatagttcgtattacagtactttttttagaaataaataacaattaggaatagtttatgttaaaattctttcttgtttattcttgatttttaatatatttttccttgatcatttttatatattgttttctttcagttagttcaaatataaataatgctttttttatgtctgttaaaccaacttcattagagtgctgaactttcaataaaattgcacctttttcaaaaaacaattcacctaataagtataaagtattcatatttatggctaattttatacctatttcactatactttattgcttcttcatattgatttgcaaggtgtaaacattttgttaacgtatgaatgagtcttaatttgatttctttttctctaggaaattctatcttattaaaattaattaaactttgttttaatatatttatacttttctcatactcttcattttctgcatgtattatagcaattgaattcattatgcttatttctttttctgataaaaagttagtactacttaaggtttgttttagtgctctatttaaaatgtcaaaagcattacttgttgctccatttacataatatatagcaatcgcttcatgccataataaaaattgtttatcctctttcgattggaaattattatcatttttctctttttttactattttataaagctcattatattgtttttgttttacacaatctctcattacacattttacattttcaatatattttatttttttatttttggttagtgcgaatatataatttggatcaataccaagtctttcagataattgatacaacaatatgctagatggataaataatacctttttctatcttactaatttgactttgtgaacatattccatgacataattcagattgtgacatgttttttttctttctaagttctttaataataataccaagattgcagaattccatctttcctccctcaaatgtaacactttatgagtataagaatattttccaacttttaatgtaatgtaaaattgatatagttacaattactaattatatggatttatagtttcttttacaaacttgtatcacaatacgagaaattattaaaatatggttcactaataatcaatgtgcgttttattcacccccactgattattagtccaccccaggtaggcttttacagggagtccgacttctttgccacatctaaattttgaggtcggagtcttactacccgcaaatagccggattaaaataaatatgatttttcacctttatttcttttaatagtttcttttgatttttatataaataatttcgaaggagcgtattttatgaaaagaatgttgaccgaaagagagttagaagtggctatttatgtagcaaaaggatacacagatgcagaaatttcaaaaaaaatatatgttacccctcgaagaatttcaacgataattaatcatattaaagaaaaatggcatattaattctagagtggaattaggtattttagtttatcattatggttttatagatgcacccttattttcaaataaaaaaattcagctatgtaaaaaggttgtacaatagatagctgaatataacgagtttaaattgcaaataaaaatagaagagcagacaaacttttattatttggtttactccatcactttttaaatttcagacattaatataaaaaggttagagaattaacttctctaacctttttatatacactattaggtttcaaacagtaaagatgccctaatgctaccattgatcctgttccctattcaaccctgtataaacaaaaaaatcagatattaccactattcaaaaccagttacaattctctctttcattttctgtattacttcactgctcaatactttttgaccagcaggaagttttaatatggcagcggcacctttactaaggtatatttcttgatcattattttgatttactaccaatattccttgcccttcaaattcgaaataactaatatcttttgtttcatttgtattattttttattgctttatataatccatataaatctttacttctattttctccgcccgttcgaatcggttcagtatcattcgcaacaattagtccttctggctgctcacccttcataataaaccacagcttttcatttgttggtaatagtaaattcttaaattcagagctatttaaaatttgctgtgctggaattgtttcatagattggtaacgaaaatggagatgttgttattttttcaaaacttaaattttcagaagaacttcccttactatattgataatcttttaatgcgatcgattgtactgattcacttttattttttgatgcataactaattttactagcgaaaataataacggtcattaagcacatgcacagtatcacaagcttaagtagttttcccatttatgaacccccgcttttaatattattagtttgcatggatattataaacagtttcactccaccaaaaattattattgttatggaacgtactgaaattatgattataatgatcaccataccaagggtccatgtatgttatataatctgttccatttgtccctttataaaatccatcaagtactagaaagtgtccgatgttagctccattttgccacataatgagtgcaatcatcggctgattactattaatttgacttttgaaccaatcataagattttgctccagaacttatagctgagctaacaccatatcccgataatccatattgtatttcacgtgaagttgcaggattattatatgatccacccttaacatacctaacgtactgatcttgtgaaggagttttcccaaaataatttaaaactgaaaccgaagtgcctgcccaacaccaatttgatctttcttgtaatatgttaggtacagataatttacggtctgttggtgtacttgggggatttccattaatatacgctgacgttacatatactttttttccatctttaaaataataaaaccaacgattatctaaatttcctgtccagtaatctttaaccgcttcaccatactcccatcctttaaaagatacttttgtatttccgggaatcacatctacaatatttgcatttaaactttttgcctctctaacatttacattcaatggagctgttgttcctgaaaattcaacttcttctgctattattttctgaacaccaataaaactaaatgtgaaaaacaataaaaacatacaaacaataaaatgatttcttcccttcatttctccaccccttcatcagtactaaaaaacatcaacaattcatccttattaattgttcaagcttaatattacatactaacgaaaaatgacttctcataaagtgaaactttaatcagtagtggttttattcatcccccactgattattagttgaaccaatcgggctgcccggcaaatagtgggataaattccaatacaaaaaaggagcctataaatttttataggctcctttttatttcgtcgttattacttagctaattctttcgtacccttcattacatcaatgaagaatccccagttattcactacagaagagatactgatatgttcatctggagtgtggacgttgaaaatgtctggtccgaatgaaattgcatctaattcaggcatcttttgaacgaatgcgctacactcaatccccgcatgtacagcgaagatttcaatttctttattgtatttttcttgatgtactttttcaaataaattacgaatttgtgagtttggattgtatggccattctggatactctgactctatttcaaatgtagcaccaactaattcagcaatatatttgatttcttctgcaacatgttgttttaaactacttacagaacttcgcacttcgttacgtaatttaatttcatcttgcaacgtttcaataacgcctaaatttgttgaactttctacaagacctttaatatccatgctcatactttgaatgccatttggaattaagaataatgatgaaataagctgcttttgtgtctctttagcaaatactttttcaactttttcatccaattttgtcagtgtaacatgaacatctggatcaacagcacgcatttcttcttgtaatacacgtgtccatgattctagtttttcttctacttgtcctacatcttctgtacgaattaaaattgtagctacactttcacgcggaattgcattcgtttttaatccgccgtgaacttcacttatgtaaaactccgtatgtactgataaatcacgtaatactcgtcctaatactttgttcgcattaccgcgttgtttatcaatttccataccagaatggccgccttttagaccaccaacatatatacggtatgcatccatattcgctggcgtttcatcccaaattacttgaattgtttcaacagctttcgcaccacctgcactacttacaagtaatttatgatcttcttcagaatcaatatttataaatatctttccttcaaaatgatttggatcaatagcaaaagctccgcccattgtcgtttcttcttcagtagtgataacgacttcaagtgctggatgcggaatttcttttgaatctaataaagctaatgcatacgcaactgcaataccattatcagcacctaaagttgtttgatttgcatataacatgtccccaatgattcgtaattcaattggatctttttcaaaatcatgtactgttgcttgatttttttcgcaaaccatatccatatgaccttgaataataatagctggtacattttcataaccagctgttgcttcttttttaataatgacatttaatgcttcatcttgaatgacttctaagttacgctcttttgcaaagcccactaaataatcactaatttccttttcattacctgatcctctaggaatctttgaaatttctgcaaaatgaaaaaatacagggtgctttgttaattgttctaaagtagaatacatttttcaagctcctctcaaaatgaaaaaataatatgtaagtctcatatcattataccatgattcattattttatctttcttttaacttttattgttcattttatgtacaacactcttacaacattgtaagcgcgttgtaatctacatcgatttttctcatttaataatagtcgtatactttctaaagaaacacattaaaggagataaagaaaatgaaaaagtttttagcaattattacactatgtttattattttttagttttactattggctgtgagagagcgtcactaaatagaattggtaaagatgtatattacatgcagataaaaggcgaaggaactatcgaaaaagtagatcatagaaacttacgaaactatacgctgtccgcatatgatgaagatggcgtcaaaaaacaaattacatttagaagtacaaaaaaagaaaacaatcataaattaaatgaagacgcgtttttacgcctttatgtagatcaagatgataatagcaacaatgaaatatcatcaattgaagtaaagtcctatgaagagattcagaaaacagatttacctaaaaaagtaaaagataagtttactattaaataaaaaacaaaagaaaatgctctatgcattttcttttgttcttttcacctgtatatattttgaactactattattcatcagtttctctaaccgatttatattctccgttaatgcacctttcacaagagagaaatctgtattggattcttcttttttttctttaaaaaacgaagacttttgtacattgacttcagccatctcttctcccccttttcaaaaagatacaaccttttatttatattatatagcaaatgtagaaagagtgtacacttatgattttctttttaattcttcttctaattcttctacttgctgcaacgtatccccttttattaaagagaaatctgttgtatcttcgttatcttctttaaaaaaatcattgtcataatcttttaccactacaatcacctctacatgctagtgtaggaatgattgtccaattttattcaactttgtcggattttgtttttaatttatgtatagaagaaaaggacagaaaaagattctgtccttatttactaaaataactatgatgtattgttaaattatatacattttcaaaatcccgatcttgcaggttatttttctttccatcaataacaatgaaaacgtcacttactatttttgctggtataatcccgacattttctacttgcaccgctttctgctcattcaattgctcgatatgttctaacgggacgataatactaaattgtgagcgaataccacgaaagtttgtatttaattccttcgcagcttcaaaaacaacaattttcgcgccaatcttttccccatatgaatctaaaaatgcatttaagctctttgtatattcctcttccgtatgccattccatcgtaccgaatactgctggattaacattttgaataattgtcgtgtatatttctcctcttgctttagatgcaattaatgatcgttttatggattgaactgtcttgccaatatcgctaaatttcgcaccccatatttctgaaatattaggcgttaaaatgaacgcaatatcaacaaaaataaccattgcagtaaacattaaaagatttttccagagggttaaatcgattccttttatcatgaaatacacggtgacagatatgataaacaaaccataccaagtctttctaatacgttgcttcttctcctcgtacaactcttcatttttccaataaaagaaaacaaggactacaaagacaatcgctaaaacaaataagccaattcgaatgttagagatcattaatcacatcaccctccattcaaaaactactcacgatatcattacatgcgcaagctgctctctttatgacaaaagacgtggacaagcttctaaaattagctacatcgcatatatattagaaggtaccacgtcttttatcctgctatttgtgggcagtaagaccccactgattaaaatttcactttaccatgagtctatattgtatatgtagacaagcattcatttcaaattttcgtattaaaaagaaatatgtttcggaatttccccttcaggtacttctccatccatacttaaataataatgacgaatcggacgtaagttttcgtctaattcataaacaagcggaatgctagttggaatatttaatgaaactacaccatcacttgaaaggttgtctaaatattttactagcgagcgaattgtgttaccgtgtgatgaaataattactttattaccactttttaatgtcggcgcaatttctgaatgccaataagcaagtactctcttctccgtatcctctaaacattcagttaatggaaattcaccttttttgagtgttttatatcttggatcggtcgcttcatatcgaggatcgtcttcagtaagagccggtggtcttacatcaacacttcttctccaaatatgaacttgctcctcaccatacttttgagcagtttcatctttattcagcccttgcaatgcaccataatgtctttcatttagcttccaagatttatgtattggaacccaagtaagatccatctcatgaagtacaatccataacgtccgaattgcgcgttttaatacagatgtataagccacatcaaaagtatatccgtttttctttaatattgctcctgcttctctcgcttcacttaatccattctctgatagatcaacatctgtccatccagtaaagcgattttcaagattccataagctttgtccgtgacgaataagtacaagttttatcattataattcccctttcggaaatgtgaattttattgttccattgcgtacacgtataaagtatctagtaatgtatctttttatccattcactctatgaccaatcgatagttgccaaatgtatggataaaatttgttctttttcaaacgataaaaacagaagttttttcattatttttgatcgactggtatttcacgtttcgatatccaagcatcaaaacctgatcggctatttgccatttcattcataacttggtgccaattgtcctcacatgattcaccaaattttgaaaaaatagcacccatttgttgtctttgtacatcactcagttttttctctaaatctgtacctttttctgttaaagacaactgtttcacacgtcgatcatgcatagcttcattactctcaattaagcccttttccacaagttgacgtagcggtccgtggagcgcttgcttacttatttctaatagtgataataactcatttacacttatccctggaaaacgtgcgataaaaaataaaattcgatgatgtactcgttgaatgccatattcttttataatttcatctggcttttcagtaaatgttttatatgcaaaataaaataatgctaatgcctcattcatctgttcttctttatgttgtgtcatctactttccccctgtatgtaaattataccacaatctagtaatgaatattttaatcaacgcattagaacttgttcagtctattgaaacattcattgcataattaggagatgattcatttgaaaaaacaatatactgtaagtacatatttattggatagactacacgaattaggaattgaacatatatttggggttcctggtgattataatcttgcctttttagatgatgtggtagcacataaaaatttaaagtggattggcaattgtaatgaattaaatgctgcatatgcagcagatgggtacgctcgcataaaaggaatcgccgctcttattactactttcggtgttggagaattaagcgctattaacggtattgctggctcatatgcggaaaacgtgccagttataaaaattacaggtacgccaccaacaaaagtaatggaaaatggagcaatcgtccatcatacgttaggagatggaaagttcgatcacttttccaatatgtatcgagaaatcactatagcacaaacaaatgtaacacctgagcatgctgctgaggaaattgaccgtgttttacgtgcatgttggaatgaaaaacgccctgttcatattaatttgccgattgatgtgtataataaaccaattaataaacctacagaaccaattttatataaaccgattttaagtaataaagaaacgctggataaaatgcttctacatgccacttcaataataaataacgccaaaaaacctgtaattttagctgattttgaagtagatcgatttcatgctaaagaaagtttacatcaattcgtagaaaaaactgggtttcccatcgcgacgttcagtatgggaaaaggaatattcccagaaaaacaccctcaatttataggtgtttatactggtgatgtaagttctccgtacttgcgaaaaagaattgatgaatctgattgtattattagtattggcgtgaagttaactgatactattacaggcggcttcacacaaggttttacaaaagaacaagttatagaaatccatccctacactgtgaaaattatagataaaaaatacggtccagttgtaatgcaggatgttttacaacatttaagtgattcaattgagcatcgtaataaagatacccttgacgttaagccatttattttagaaacatcaccttttactgaagagttcaatccaaaagcacaaatggtcacacaaaaacgtttttggcagcaaatgtaccatttcttacaagaaaacgacgtcttaattgtagagcaaggaacacctttctttggtagtgctgctatccctctacctaataacactgcatatgtaggacaaccattatggggatctatcggatatacactgcccgctctacttggtacacagctcgccaatttatcacggcgcaacattttaattattggtgatggttctttccaagtaactgcccaagagttatcaactatactacgtcaaaatttaaaaccgattatatttttaatcaataacaacggatacactgttgaacgtgccattcacggacaaaaccaactttataatgacatacagatgtgggattacaataaactatcaatgatatttggatcagaagaaaaaagtctaacatttaaagtagaaaatgaagcagaattagcagaaaccttagtaaatataatttttaataagaatcaacttatctttattgaagttataatgagccaaagcgatcaacctgaattgttagctaaactcgggaaaagattcggtcagcaaaattcttaatataaaagcataacctaattatacaactagtagtgtaaaacttgttttgagaatagtttcgacactcaaaatacataaggaaaaggatggaaagtaccatccttttctattttaagagccttcttcgactaacgccccgtgcgacaagcaaaaattcttaatccatctttaattttatagcttttgtcgcaataaatgttttaatatgcttatctaatatccttgttccaccaaaatcatcctcataaaaacctgttatagcaaaaccagcatcaatttggccttggatttggtcttctaaagtatgcgcatattctattgtttgatttgaatcgatgtaatcttgaacttcatcctctggtaaataatccaatgttgatgaaggaattgaatgtttaacatccagaatacctttttgctcttggttatcatcaaaaatccatagtaacggatttgtaaatccagcaataagaacacctttattctttaaaaccctagaaacttcattccatacaagatgaacatctttgacaaacaaattagacacaggatttacaacaatatcaaaatattcttcctcaaaatcactaaggtctgacatatctccttgtacggtttttaaagttaaaccatcccgttttgctaccttttcatcttgttccaattgcttcttagatatatcagtaactgttacatctgctccagcagcagatagaactggtgcttgttgtccgccacctgatgctaagcaaagtatctttaatccatctaatgactttggaaaccattctctaggaactgatttttccgtagtgactgtaatctcccattcacctgatttgcttttctcaataatctcgctacttacagactgcgtgtatctagaaccttcttccaccttcttatcccatgcattactgttttgttgtgtagtatccattacaattattcctcctaacaatctagttgcattttaagtgtaaacttattaactatttatgctttcctttttctattaacccgcctgatagttcatacatagttgtctatatttatattaacagataaatgctaataatcgctaaaaattctaaaaagacaaaaaattatacatctattccattcatttaaaataatcgtagaattggtaagttttaaacaactcacttccacataaaaatagcattccaaatctgttgacagttggaacgcttttttatgttatttcatttttcaagcttttaactaaatccattaaacaaataagctacgctttttctttttttattcagcaagagttaactgccaagatacaccatacttatcatttaaccagccaaactttttactaaacggataagaacctaaaggcataagaatcgctccatcctgcgctagtttatgaaagaccgtttcaatttcttcttctgtctcacaagttacataaagagacatagctggagtgaatgtaaaattatgatttacataactatcaatacacataaactcttggccatttagcgtaaaagttgcatgaattacagttccctctttaccaggtccattttcatcgtagcgagaaatacttacaatttctgattgatcaaatagtgacgtataaaaattcattgcttcctcagctttgccctcaaacattaaaaatgtagtaattttttgatttgcgttactcatatggagacagccccttgttatgtatttatgtaaaacatacgccaacaaaaccaaacgtacgttccttttaatatattgtctataaaaacgatgagtttgtcaattatctactttattatttcttcttaaataatgctgtccaaagaaatgattctccaaacatttctttcggttgtttcatttgtttcattcttctaatcacaattacctcaaattctttaaatatctctcttaacttttcttccgagtatgcaagaccaccttgtagactccaccctctatatacgtcccaatctgttatttccgatccatttcgctcatctaaatcacctgccgcaaaacatgttaatccgaaataaccacccgattttaatgagtttttaattaaatccacataatttattcttctatgcggtggaatgtgatgcaaacagcccgaatcgtatacaaaatcaaattcgttttgaacctctaaattaaaaattgaatcacaaataaaatgaattgctacctcttttgccaatgccctttctttagcccaattaatgccttctacagataaatccactgctgttacatcaaatccttgagtcgctaaataaatggcatttctacctggaccacatccaagttctaatactttcccttttgaaactctctctttttgtatatacgaaactaggttctcatctggaacattttcaaaaaatggaacatccttttctctattctcataaaattcattccaaaatggttctgcaggtcttaataatgaatcaagcatttttaaaatgtcttcttgtgtgtgtaacgtttcatttttcattaatacccctccacaaattaatagtcagaaaattattatatatctttttgaactttcaaacaaagaaaaaactcctacattcaataggagtttttccctttaaaatccaagtatagctaaccattttaacaacttctcttctcatactttcaaatgatcatgttcctatttacccatccgtatttcactaacaatttctccgtctgccaaaaaaagaactctttctgttttcaccgctacctttacaacatgagtcacttaagaagaatactttgctgaaaaataaagccgatttcgttaaggcatatttttgctaacgcctcttctttcatacatgatatttcatacaatcatacttttctaataaaataacgtttttgttcacttttttgatacatttacgaaacattcatgtgttatcttcattaagttcttttctttttataatgtcgtgtgagatataccaacagaggaagccctagatcccctaatcctagggcttttttataagaattttatacattttattatttccactaactctttaaattgtatatacataatataaaattttcatgttgttatattttttgatggcctcttatctttccttaaaaggcttttgtttcaaataacgcttttgtttaatttatatttaaaaagttccttttcataaagacttcccttatatgctatactcattcttaaataattgtataaggaatgttaaaaatggatgatagatcgtcaagacaatggaaattgcgacaaaagttaagagcactgaaaaccaaaaacaacaatgacacaaaccctttgtttagtgaatgccttgaatccctaggaaacgaaactctcattttctcccaagaaaaaagccagcagattgctactattttaatgaattcatttcctataactgtctcgggaagaatagattgggaacagatagataatcaattcatagcttcgaacaaagaacaactaatttcccttattagagcaaaccaactagattttgacgaacagatttttataatatgggataactatgaaatccctgtagtaagtacaaatcttgataaagtattccaatcactagttgacgttgatgcagtcagtttttattactggctattagacaaagaatatagattcgtaattgaaataaatgatgaagaattgattaggattgggtttcgctaatactctaagcatatgaagctagttcccttcatttcttaatattttcttcgtcaccaccgctattattatcattatgaaactaatagcaaatataggtaaataaattttcgtactgaatccttcaaacataaaaccatatacgacttgcccaattggtgccatacattgagataccgctgttataaatgccatcacttttcctagattttcatttggtgttttcttttggactacagtaatcacataaatggatacaattgtcataatcattgcgattagaagagaagaaagtataaagaggataaatggtggatagtatcctaaattaagaataaacggtgtaactgatagtgccactggcattactaataaagctatgataagcatccaattatataatgttttcatctgtaactttttagcaaagaaaccgattgacaatgcccctaatatggttgcaaaatcaattaatcccattccaattccatacatcgtatcgctactctgcatagttactcgtaacataataggtcctccaacaacaaataacggtgtcaaaattaagtttagtaaagttgcaagtaacatagccttcaaaataaaaggttgctttaaaacataaagaaaaccttttttcatatcttttacaattgtcggtatgatatggctttcttgcgctctttttataaaaggtattgtaataaacatttctaaaattgcagataaaaagaaagcaagacaacttgttattacgagcattttcaaaccaattatgccatataatattcctcctagtacaggtgcaactatattagataatgcttgcacaccatttatgataccgtttgcttgttctaactttttctctggaactaattgcggaatacttgccataacaactggtgagtacattgcactaatgactgctagtaaaaacataattgctccaatcaataaaatagataccgattcagttaataacaaaactataaaacttaatacaatagcagcgtttataaaatccaaaatgaccattacattacggcggttgaaacgatctgctatcgctccgccaagaggagctaacaaaaacgggatactcgttatggcatataaccctgcaaatatatcggcacgtcctgttatatctagcacatataaagacagtgcaaaacgtaatagtgttgaacctaaaatagtaataatttgaccacttaccattaagtgaaaatctttcaaggaagattgaatacttgctggcatcttcatcacatccttcatttagtctagaccgactgccggtctataacacccaaacagaaaaaagctatttctgtttcattaaaacctcgatcatataatcaaaggacccttctttcgctccaacagatacttccatcattttaatataagccttagctcttctcatcatttcttccggtttccactggaataaaccatcatcaaatatgacttgtgctgaagagagtaataattcaattgtttcttgtgggtatggagtagaaaatatgccttcttctattccttgctctaaaacttccgttaatacaggagataaatgtataatggattgcactaaacttttctgatgcatttctgcattatttggttgatggaattgttcaatcattttttctttgacatctcctgattttggtgattgttccattaaaattttaaataacttatctaaaacggggatatcgggattggagacaatccttttcgccttagtgacatcctctttaataatcctcataatgatttcatccattacttcctccttcgacttaaaataatgataaaacgtcccctttgctataccaatttcttttaaaatatcattcacggttgttttcgtataacctttcgtaagaaacaaacgctcagctgtttctaaaatttcctttctacgctcctcatactcctttacaattcgcattcaagttctccttcccatcagaccgactgtcggtctattaaaattatatgtttagtttgcaaaaagtttcctattatcgtacatatacaacaccatactttctatttcctttataaatttttattttttaacgtccgctcaatttgtttaaaacgtatctcatgtttcttatcgtcacctttcattttaggaaaagaacgatgcctccgttcgatctatgtacttatcaatggagtattttgttgagttccaatatgtaatattgcatatttcgtacttttaatttttgtatatgtaataatttatttataaaaatataaattattaataagggtgatttatatgagcaagttccgaaagaagattattaaatatttgcaaacattttggggatgcttagcatttggagtattaatgtttgctatcttcttaattacggatttaacagatgcatctttaaatacattaggctggagagactggctaggttctgtagcaggcgcaaccattttatctgttgggatgtttactttaaataaattgaatttaaaataaatattcggtcaatactgaatttgggctgtatgccaacattcatttaaagtagtcttctctgtatctccttgtattgagcagttagcttttgctagccgctcttttattttgttccggttcttgcctcttaaagaactctttatctactttcccccaataagtacacatatctattctccattgctacaaaatgaaatctttattttgttttacgcgtcgcttcttcaatcagccaagatacaatattaaaatcattagtttcaccctttaaagatgttccgttccaaaagcattctttcatcacttcaagtaatttttcaacagcttcaattcatctcatattaattttccctttctcccaaataactattttgttttattaattaactgattaataaaacaaacacctttattaaacattccatgtttcttcaccccttgaatatttttcaaataaaaatacatactattttcaagccgccgtgtccatggctaatacctctttcttttgatgtatatttttttagaaatcgaaaataataccaacaagctgtttgaactagcagcttcactcttctcgcaatggggatgcaaattatcacaattagctaactcattgaactcactggcagacaaccaaaatcgttgtctgctttttgtatgagatttttcgttttacatatactacttttgaacctgcagaccaatacgagccattttggtgcttgggatttcccttccggggataagtatcttttacttatcccttttttgtatagacacgtatatttagggtaaaactaattacaagcagattttctgtttatgcgtagttctaaacaagattactttttctcctattaaaggacggcaggtacgactgctagtccttttttcttatttcgcatattatcactaaattaccttcatcgtcgtcgtaagcaatttccccataaggatggcagtggtgcttctcgagttcctcatcgatcaaaactaacaaattagttttccagtttccaacgatcgtacaccaatacgagtttaatccttcataaacttctcttgttctatttcaataattgcggaatgtataatgaaaatactcgctcgcttcaataccttttcttttaaccaaagtgttctgctgaatgatagtaatacccttgcactaatggttttggactataaaattccctttataaatttcaaatgcggtgaatgaaattttgtttttttcttgccatcatccttgttgtatacaaacaaaaaaagagccacaatattttgcgactcttttacaattataaccatttaacggccacgtctttgctgaccttgctttgtactaccttttttattacttggcttattaaatgatcggttattttcatttctagaactatttctcgaactatttcttgaatcacttcttgagctatttcttgaatcacgtcttgattcacttcttgaaccttcgcggctatctctttgacgattttgacctgatttcttcggagccagctttggtaccggttttccattttcatctacacgttttatcttcggttgttcgattatttctctttgtattggtgcaccaagcgttttttcaatttcttctaaatgtttttcatctttcgctgcaacgaacgtaattgcaagacctgatccacctgcacgtcctgttcggccaatacggtgaatataactttctacatcttcagggatgtcaaagttaaatacgtgcgttacaccatctacatcaagtccacgagctgctacatccgttgcgattaagtactgaattttagcttcgcggaaactcttcataactctttcacgtttcgcttgaggtatatcaccatgaagttcagcacaattataacctagtccttttaaattatcatacagtttacttactctaagttttgtacggcagaaaataacagctaaaaatggctgatcacgatccataacaaaacgaagtgcatctggctttgcacggtctgtcgtctcaatgacacgctgctcaattgtatcaaccgttacttcttcactttgtacttgaatcatttgcggttcatccatataacgcttcgccaattttttaatatcttttggcatcgttgctgagaataacatcgtttgtttactacctggtgtctcatctaaaatatcttcaatatcatataagaaaccaaaataaagcatttgatccgcttcatctagtacaatcgttgaaagattacttaaatcaattgtttcacggcgtatatgatctaataatcgtcctggtgttgcaacaacaatatgtgtattaccttttaattttctcaattgttgtgctacatcttgcccaccataaatcgctagtacattaatatcttctctttgaacaagcatttttttaatttcagttgtaatttgcagggctagttcccttgttggtgcaacaattaaagcctgaacatcactagactctgaatcgattttttctaaaatcggtaacacgaatgctaacgttttacccgtacctgtttttgcctgcccaataatatctttaccagacataataacaggaattgcctgctcttgaattggtgttgcttctgtaattccattttcacgtaatgtatgattaaaagtttcactaattcctaattctaaaaaatttttcaaatagaccacttcttttccttatttttcacattagctttcattgtaccatttgtttcgccaaatatgaaaaataaaaaaattcttatcttctttttttatattcatcctgtactagatgaacaaattctttttgctttttctcagattttattaatgcttccatatttatagaagtcaaaatataccttttaatttttctattactccaaattaaacttgtatacttcagatcttcatgtagatttcgaaaccactctaattcacttaattttgcgatatgatgtttcaatttcatgtcatttcgaggataaaataaaatgatatctgctattacatcaaataacgaacccatcttctcccccctatactcttgctcaaattatatatattcttctttacatatatatttcaattttaccgaaatataatgttactgatttggttgaaatcgcaaaatatatgaactaaaaaccaatcttttcgatttaggaaagaccgattttcattaatttatacagtaagctttcctccatgatagcaataatactgtgttgctttaaaacttttaatcctatttaaagactgtttcgctttttctatatctaaacaaaaattcggattagctattactaacccacgattctcttgaacagccgcatctcccgtaattacacaatctaaattcggaaaatataatgaaatatgccccgaagtatgtcctggcgtcgctactatttgacattcattattcaaaatcatttgaccatcatgcactttttcatcgacggaaatatgttttatattttttaactgttgtataaaccatttaccaaattctttttcttcatttggcatacgttctaacatttcttcagcttgaactaacctctctgattttatatcaccactaatatagttagattcaatttcactagcaataacattaatttgaggatatttcactttaaaatcgtataaaggccctatatgatcatcatcataatgagtaataattatattctttaagttttttatctcatatccatgttttaatattgcattttcaattaaaggtaaaaaacttggatatcctgtatcgactaacgttaattcattatgtaatataattaaacttggataaatacattgtttttgcccgttaaattcgaattcaattggtagttctattattttcatttttcttcccccataccgcctattcaatatttaataataaccacttcgtccacatacattttactatacatattaaaaaattttttatcagtattttgttttaagttttttattagttaattctatttttaaatgtggataccaaagttattttatatctatttctcatatgtgttagcaagttcgtctgtaaaatcatagacagggttttcactcttaacctaagctgttactttttataaatgaattttacccttattggacaagtatccgtttcgtaattttcatatgtaataaaagagacatctccttaaattagaaatgtctcttttaaattaatagaacaaattcagttgtatttcttttttgtgaaaagttttttcatcaataaattatacattttcagtgcttgtactacaacttgtcgagtataaaattggtataccacatatagcatcattcattacatcacgaaaaacttttgcagcgacttctgtgaaagtttggcatagattagaaatatcatcattaaaaaactgaatcacttttgcagcaaaaaccggaaaaacaacattcgctccacctgggaactgcggctgcacaacaacttgctcaaaatacaagttgctttctaaagctacttgaaaaaggtgtgcaatttcaaaagcatctaaaggacaaggaattgggtttacaattccatccccaataacactaacaacaatagttacatttacattgccaaattgcactgtaggtttaagaagtgtagctaatgcaatcgctttttcaaaatccgtagtttgtactaaaataataaaatttccatcagtcggtattagcggacctactgttacagttggatcagcccctaccgaatttctgagttcgttaaaatatgtgatccatggcggtgaaagttgaggttgtacacgctcgtccattctttttccacctccttatacaattctcaatactataatatgaaaaaattctaatagcgcattagatatatttattatttttcatagcattttcgtatcaatctgagaattttgtttgtttagaaaaccttttagaaacatttaaccatttattgtatgtcaataatatagtagtgaaaaatttacaggtgaaggatatagaaagaacaaggttgctagttcattaattgtaaaaatatgacgttttagatgaataagctttatttgcagtaatatacctttattattatgtaccttatattgcagcgattcactaataagacgtacaatccctatccttttagaagtaattaaaaccttcggtgaaatcttctttagatagataccatttgcaaattgtttaatttaacaaatactacttgcatactatgtaatgaaacactgtgaatcattgtataatccacattatattattttgaacaggtaatcccctatttttatggaaatatataattaagaaaaacaataaaattgattaatctctcacttctttgtccatccttttaaaaaatctatgtttttgtaaaaggagtgtttatatggagaaacagacactttggaaaaagttcaaaaaaagctctgtaaacctcggtaaatctagcgtatatgaaagtattattttattctacacaatgaaaaagaaagaattacctactaaggcgaaattcataatattagccgctttatcttattacgtattaacaatcgatttcattccagatatagctgctattattgggattggcttattagatgatgttttagcaatcgctgtagcgcataaatacgttatgagacacgcagatgctgaaattcgagaaaagagcaaagtaaagatggagtcattatttacttcagcacaagcataatgaaattatctagtcatttacctacctttttactttcaaataaagctaactgtaattaatgatagttccacctcactgaatattacccttcaccatgagagcatagcagaataaatccctaaacaaaagcatttctcttagctctcaaaccgtaaacaaatcgggaatcagcacttgttcctaagttctgactcccttttatttgttcttatatctatctgttatacagttgcatgcattcccttatacaaaactgccattgccgctactataagaatcatacccataaaagcaggtacggcatgaccaagtgatacatagatttgtcctccaataatcggaccaatcattcttgctaaagcttgaatagattggcttccaccttgaatccttccttgttcattagaactgacagactttgaaagcatcccgttgaatgaaggcccgaaaattgaatccccaaaaccaaacattagcattccaacgataagtagtggagagagtgaaaatacagctgatgctgcaataaaactgtatcctataatctccaaaaccatcccaagaattgctatttgtttatcactaagcttaattaaaagctttggcattataaaactttgtgaaacaatgtcttgaaagcccaaaattgaaaacataagtccgattaatgcaggtttccaactgaaagtatccattgtaaattgcgtgaaaattgcttgtaaagatccgttaggtatccaaagtaaaaacgctgagataagtaaccattttaaattttttatggaaagtatatttgctagctgtgcaaaaggatttaaccttacaaaagtaatctcttttaacctgttatttttgtcaaggctctcaggcatgtatttcataccatataaaacatttaataaagttatgaacgctccaaagtataaaggtacagaatgaccaaactttgcaagtaagcccccaagagttggtccaataatagttcccgcacctacaactgcactcacccatccaaagtatttcgttctctgctctttcggaatgatatctgcaaaatatgcgaagatagtacttatgctcccacctgttataccttctattatccgtccagcaaataatacccataaagctcctcctatgccaaaaactaagtacccaattgcagaaccaaataagcatattaaaagtaatggacgacggccatacttatcgcttaaagccccgagtgctggagcagctaaaaacacgcaggccgcatatacggaagttagtagtgtaacaaccaatgcttgttcttccggattgcttgtatatggctgtactaagaatgggactacaggcataatgatactgaaacctataccacaaagaaatacagaaataagtccgaatagtaaagcatgtttatctatgcttttttcagtttccctttcattttgtgatctaaatatagacatttaacttctctccttaaaatgttttgttgctttgtcaacaaaatgataactctgttttgttgattagtcaacaaagataaaataataaaaaagcagcctattctcatattagagtaaggctgccattttattattaaaatgtattacgatttaatatgtataccttgtttctttatttctgcatccaaatgtctactatacttttccacaaagctaattatactgtcgaattcttcttcagttacttgctcaaatacagctttatcccgctcttgaaactctttgtgcagatcttcatggattttataaatttctttcccttgttcggtaagcttaaaataaatttctttcttattttctgacttttggtaactttcaacaaggcctttttgtatgagcttcttagtcattctacttatagcaccgcgagtcacataaaaagcctctgcgagttgcgtcacgttagaatctgcattgttttcaatatattcaatacagtggacttcagaagacttaaaacctttaagaccttcttccatcttatctttattaagccaaaccagtttattatataattccctgaaaccgttcatgacctgttcttctttattcatgatctgccctcctcaccgctcattagcacattaaaactattatattaaatttctgcttacatttcgacaatattgaaataattattgtaacattaaagatatgtgtaaaaataggcgcttaaataaaataatttttaaacagcaaattttgcaagtttattgctacttacagtaaacagtagacaaaaagtaagagctaagactatttctcttagctcttctttcataaaactatttcacttcattagcgacaaaaaagtgctcacatacacttgatatgcgctgtaagtctacgttcccaccagatataaccgctactactttttttccttttatatagctatcaacttttcctgcaagaagtgcagcagttgctaatgcacctgcaccttctacaacagctttcccacgttgtaataaatctttcatcgctacttccagctctttttctgatacagttacaatatcatctactaattcttttacaatttcaaatgttaattcacctggtattttaactgcgcaaccatctgcaatagtaggcgcctcataatgttctacgattgctcctttatcgtaagatgccttcattccatgaacattatctgcttggacaccaattatattaatggatggattaaaagatttcaatgctacagcaatgccagaaataattccgcctccaccaattggtacaatgacagtatctacatcccacatatcatcaagaatgtctaatcctattgtaccttgaccagccattacctctacatcatcatatggatgtaagtatgtttcacctgtttcccttataatttcttcacattttacctttgcatcatcaaaggtttcaccatgtaaaatcacttcagatccatatccttttgttgcttcaactttcgcctgcggtgcagaaattggcataacaattttactcttaataccgagtaaatgagcagataatgcaactccttgtgcatgattacctgctgaacatgcaattacacctctttctttttcttgatccgtgagccgcgacattttattaaatgcgccacggaatttaaaagaacccgttaattgcatattttctaatttcaaatgaatttctccgcccgttttactagtcaaataaaaagattttactaatggcgttttacgagcatttctatctagaattttgtgagcttttttaatatcgtctatatgtaatggtagttttctagttatcatactgacacctcttccaaagttctatttctaagttttcgtaagtcgtagctcctttatacgaaaagagaaaatctttatatatgtaccccactctgaaataaacatatttgcaaacaatttaacatcctcttcatatcgcgttctttataatgatttaaacatgcaatttgaatccaattattcttttgtaaataagatgactcataatgaacaacgtatccttgtaatgctaatgcatcgcctactactttagaagaatgctcttcgctcaatacaatagtaagtataattggtgcggcgtgttctttagttgaaacaagctttaaacccatatcagtaataacttcttcaacataatcgtatgtctctttaatttttacaaatgccttttcatcttcaaatctcttcaacgcttcttgcaatgcataaattaaattccatgattgtgagtatggaatgctttcattttcttcatacatgccaatgtccatataggccggcacagcctcgtttatttttacaatgtggttatgaaaaacgaaagaaattcctgtatatgatttaatcgctttaccgctaacaccacttgcaaaatacacatccttcaagtctaatggtattgctccaattgaacttatacaatctacacatagtttcatttgattctcgttacaaagagtatttagctcgtctaaatcgtttaacattccagtagatgtttcatgatgaacaaaccaaagccattcataatttccagttattattatttcttctaattcgttataaataaacggctctcccatttcttttttatacgtatcaaaatgtaattgtgctcgttttgcatgtccaactaatctatttccaaattctccatttgttaatattagtcctttcccttttaaagaacgtaactgtaaagcaatcgcatcatttgctaacgtccctgttcctaacataagctgtacatgttttgcttttgtcatgtgaagtaaccgttttttcacattgtccattgtcacttgaaatgacttagagcgatgcgaaataggccgcgtagaaaatgcctttcgaacattctcttcaatatctactggaccaggtaaaaacgtatattctttcgtcataatccctccaacactcgactcttcaaacatagcaggagtaacatacattggctggaaggctgcttcttctgtaccaactaacgtatgaaaagatttgaatcccatttgctcatataaaggtagttcacgtgttgttgcagaaatgagtgctaattcatatccatttagaagcaaataacgatgtagaaaacgaattaatcctaacaacgctcttccatttctatattcacgttctactgaaagtaaacgaatttcatacactttttctccatgctcttgcaaataaatatctaaatttgagattttataatctaacgagaatggtcgttttccccgcactgcgaccatacctactaatctatcctcatctaaacaaattaaatatgtattttcatcatgaaagcgatctatacgaacacgctctttcgtttcttcatgttgcggaatttcttctacaaatgttttataattcaatttatgtatacgttcaaattcccgatcttgatcagcaactttataaattaaccccatggcttatctcctttatgtatttaataaaaattataagtggagatttactccacttattaaaatttcgtttcagtctcgatttacatataaaataagcacaatgataaaagcacttaaaatagtcgtaataatagaataagaatacaaaatcatgcaaactggtaaacaagcaattgtaattaaccctggcttagtaaaccctttaaaaattaaataaaatataatgaaaacagcaacaagagtaagcgctatcaaataatcaaatgcgattaatcctccaataaatgttgatatgccttttccgcccttgcctttaaatacaattggataaatatgtcccagtaaaacagctagtaaagctaacattacaaatgtagaatgtccaaaaaggtattttgcaatagaaactacgattgcccctttaattgcatcacctaaaaatgtagcgatgaaatatccttttccatatacacgccccatatttcttgcgccgggattcccacttccttcatctcggatatcaacgttatatctccatttcgttactatataagcggtcaatatgttcccaaataaataagaagcgaccaaatacaaaaactgcatactattaatcatataatcattcactttctacatggaagtacttatacaatattcatgaactatgtatattgtacttttttatccacttccctttatacattttaacatcatatatttacaaatcatacaaaaattctcatacgctatttttaaaaatatatatccctcattaaataatatgttcctttcactgccatttctgcttgtgatacgaatgtaatttctttcatactttcttcacagcatttcttaaatacagcaaatatttcaggaactaaacgcaatatactgccacttactgcaattggcgttgagtgcttaaagttcaacttgttataaacatttactgtaatccttgccaattcttttccagcttgcaagataatttcacgtgcatcatcattcccatttctcgcttcctgaataactaatggcgcgattgctgcaactttatcttttgaagaactataaactagtctttttatatgagacgacgtcaaaagttgaaactcatcttgaatccttaagcttaatggacaaagtgcaactccttgatcaaattgattggccattctttttaaaccttgtaatgcaatccaatatccgcttccttcatctcctaaaatatgtccccatccaccactatactcgtacacttctcctttctttccaagacaaattgcacctgtgccgccaattgttaaaattccatcttttccttttaaaacagctgcatgtgcaatcatcgcatcattaaaaacttcaattggtgttccatacttcttctttagacgtaatgttaattcattcgtatttactccacttacacccgctaatcctaaacaaatacaaacgcaatgcccatttaatacacctttctggcattgatcaatcacctccataatatgcacaagaacttcttcaaaatctattaatatatttccaaaaccacttgtagctcttacaagttcatttccgtctttatcaaatgcaattgcttctgtctttgttcccccgccgtctactccaatcatatatttcatctattcgcctcattcatttcaaattggagggaatgttatattcccaaaaactacagattcctttgcacctgttgcgctcggcacattactcggattacgatgatatgtttcatttgctaaaatggcaaaggcgattgcttccttcgcttctgaagaatagcctatatcttcttgaaggaataatgcacatttttcttctttcaatccatgccgtatcatttctacaagtgtatcattataacttccgccaccacctagaattacctcatcgatttcataatacggcagaataaactccttataatgataaacaattgaacttgctgtaaaccttgtgacagtcgtcaatatattttctttactatgcttttcaaaccgctttaataactcactgacaaattcttctccaaactgttctctaccagttgatttcggtggattcattttcagaaatggatgattcatacaatatgtcaaaacctcttctacaattacccctgcaacatacataacatgcatgacctcctatttactaaaaaacaatcatgtaagtaaccaacgtacaaccaatcgaaaacaatataaatctaaaaaacaactgagctttcgatgcaaacgatccatcaatgaaagaaacaactaccgtaagcaaaacgcttgccgcaatacttgtaacgagccaaatactatgcatttgtgataaatttagcatgcctaataaagggacaaaaagtaaatttgcacaaatcactccaaatagtaataaaaacacacctttataactaaattttatattcattctatttccccctttctagttttaatgtgaaagaagtgatagacaaaaagtctatcactcaaaataacagcatgcagattaaggattaaccgactctccgtcaccattcttttcgatttcaagcatatttttgtcgtacattttaaagaatggtaaataaataagaaacgatattgctatatttataaaaactaatacaatcgcacgccaatctccacctgttgctaaatatgcaccaattggagcaggtaatgtccatggcggcataatatgcgttggtgttacaaatcccattgcggttgcagcatacgctatagtagctgttactaacggggtaatgacgaaaggaataattaaaattggatttaatacaatcggcaaaccgaatataaccggttcatttatattaaaaatccccggaacaatacacgttctcgataatgctttcgaatattttgatcgaccaaatacaatcatagctaacacaagccctaacgttgcgcccgaaccaccaatccaaataaaccattgataaaacggttctggtgcaataaacggaaaatgactcgctccacttgctacagcttcaccgttctttcctaaatacacatcccaaagtggccttgccacagtacctacaactgatactccgtgtatcccgaaagaccagaaaaacgtaattaaaaatacaggtataataacgccaaagtaactatcaccagcttttactaacggtgcggctagtttatctacaacgtaatgtaaatcaactttaaaaacgactgtaataagactcatcataataataacgaatgctgcaggtataagtgcttcaaatgaacgtgatactgacggtggtacttgttctggcatttttatcgttacgttattcttcttacaaaaccttaaaatctcaactgataaaatagagacgatcatcgtcacaaataatccatgacctccaagatttgtcatcggaagcatgaatccttttttatcaattaactcaggcgttaatgttaaaagtagtgaacataccgcaagctgtgctcctgataaagcatctaatttataacttttcgctaaattatatcctattccaaatgctatatataaggacataataaacatagttaaacgatatggtatcaatatacttgtttgattctttaatgcccaaaccgatatgaaactatctttcggcagtggtggaaatgctactattaaaaaaaagcttcctactataataaatggtaacgccgaaataactccatcacggattgcttgtagatgcctctgctcagaaagccttgccatcgggccagataagtttttatcaagaaacgtgacaaacttattcataacgcttcctcctaactaattaattcatttacagtttttaataaagtcgggcctccaagtggcgtgtatgcttgcggtggaatgatgccacacggaatagattcctcctctgcaaatttttttacagagtcaaatcggtgtcttatttgaggtgccaccattacgacatcccagccattctttacttcttcctctacctcattcgttccaattgcatgcacttccatgttcacaccatttttctccgcttctttttttaaagcgtttacaacaattgcactggacattcctccagaacagacgaacaaaactttcatttattaatcctcctatacttataatttattacccttcaaatgaaaggaagtttcactttactaacaagcatatgaagtagtaaatgaatttagttataatgaaagtaaatttcattaaaaatatttttcctattaaattaatgtttcaatatgcaattttctctattgcaaagtcaacctcgcctcctatattattttaaataatcatatgatagggaggcgtataaatgatcgttaaacgtttattaatgatatgttgtatcgtcatcttgttcatccctttctctttcattccccctcactctacttatgctgaagtaaatactgcatacaaaaaacatgaattacgtgctgtatggattgcatctgttctgaatattgattggccctcaaaaactggcttacccattgaaaaacagaaacaagaatttataagattattagacgatgtaaaaagcactggtatgaatgcagttgttgtacaaattaaaccaaccgctgatgctttctatccttcaaattacggtccttggtctgaatacattacaggaacacaaggaaaagatcctggttatgacccgcttgcatttatgattgaagaaactcataaaagaaatatagaattccacgcttggattaacccataccgaataacgatgaatcacaccgatataaatcgattatcaaataatcaccctgcaaggcaacatcccaattgggttgtcccttatggcggaaagttatattacaatcccggtattccagaagtgaaaaaatttataacagaaggtgctttagaaatcgtgcaaaattacgatattgatgcgctgcatatggatgattatttttatccatataaagtagccggtgaagaatttccagatcagaaaacgtacgaaacatataataacggtagatttacaaatatagaagattggcgacgtaacaatgtaaatgaacttgtaaaagatttaaatactgctataaaacaagaaaaatcatatgtaaagtttggcattagtccgttcggcgtatggagaaatatagctgacgatccgactggctctaacacaaccgcaggccaaagaaactatgatgacctttatgctgacacacgtgagtggatacaaaaaggatatattgactacattacaccgcaaatatattggaatataggtttcaccccagctgcatatgacatattagtagattggtgggttaaagaaacaaataacaaaccgattcacctatacatcggtcaagcggcctataaaattaataataactccgtccctgcttggtctgatccagaagaatatccaagacaaattgcattaaaccggctatatcctgaaataaaaggtagtatgcattttagcttaaaagatattaataacaatccacttggagctaaagatagactctcaaaagacatatataaatatcctgcattaattccgcctatgccttggcttgatcatgatccaccaaaacaaccgactttaaaaggtgccattccaagagatgaaggtattgcaatcggtatcattgacaatagagataatgattctacttattacgctatttaccgcgcgaatgggaaaaatgaagtggatatacaaaatccgaaaaatttacttactactgtaagaaaaacaaaacttggagaaatttatgtagataaaaccgttatttctggagaaacgtatacgtatgtcgtaactgcagttgatcgattgcataatgaaagtgtggcttctagtcatactaccgttaatgcaaaataaaatctcataacaaaaagcgccctaaagctgtgatacttagcttttaaggcgctttttgttatttattcttaaacttctcagtcgctgctctcatcttcacatttaaatcgtgatcaattgagtcgcgaatatctcgctctactacttccatttctttttggaaattttccaagtagattttcagttcttcttctttctctggtctttgtgaaggtggtaattgtactaccaacgataacatggccgttaaatctttcattaagaacgtttcaagtttatgttgttgttcaaacatgcgttgctcttgatagtacggaagtgcattcaatactgaaattgtaatatcatcaaccgttctttgtaatgaaggatttattgagcgtttatacgcttgaattgtatttaatgcgtctggataacggtcataaaaatacaatttgtaaaatgataagtctgtcggttttacagtttgctgtgtctcttgtcttaagaaatctttcactttcatcgcagctacatcaatatcttcattcgtaagctttttcgtagtttttgccattacatgcacttttttctgcttttctttcggtaacatcgagaagacttgttctctcgtacgttgacctgatgcacaaaatagagtatttaatgtattttgttctttctttccttcagtgcgaatccagcgataaaacagtggatgttgtgtaaattcttgtagaaacggtattgatttgtttgataacttgtctaaagaatcttgcgctcttttatatggcttcgtccatgaaaaatacagcttccgtccgaaatatacgactaaaacaacgacagtaaatgctattaaaagcaatgtaccgagtagtaataatactgtttgaatgaaactcatttgttcacctcctctaataatccgttatttccttggacgctgaatgagtttctgcttcatctcatcattaaatgtgtctagttcaataacgaacttcttacttgactcgataatacgttctgacgatttttcagatgcttcaattgcagcgaacacattttggaatgattcacgtaatttatccatgctaatagcagggttttcaagcaattttgtcgtttcttctgtattttgttttaacgcttgagaattacttaataccatcgattcaattgcttcatttgtcgcattcactgcatcgattgttttccgttgatttgttaacgctaactgaatagcagctgaaaccgttacaacgttttgcgtcatcgtaattgcattacgaattgcctctgttaacttttcattatttttcttaataatgtctacagatgcgatagattgtaataaaacacttttcgcttgctgcatattacgtgtacgtacaagtatcttttctaacgcatcgttaattaatggaatatctctttgacgctctgggttttgtttctcagcttcaagcatgccagcaagctttttccctaagtatacttgtttatcaagcgcatgaattttatcgtgcgattgttctttaagcatttcaagacccactgtatcctcttgtaagttatcacggccaattagaagggatctaatgatttcctcgatttgtttatctatagattggtatttatgcacgtatgtttcaagtggatttttcttgaatactttaaacattattttcttcataccacttgctttaagtgaattgggatcaagctctgataccacttttcgtaattctaacaatgtatttggaatttcttcatttttcccattcatcatcgctgttacaggacgttttaatgctgacaacgtttgtcctgctgcttgttgctctttatctcctaaatctcctagctgagacaatacttttgataaatctgtattttgctcgctatttaacttttgtacataaagatcagcttctttattcagttcctctaattctgcatcttttataactgtatcaactactacttctacattattatctttcatgatcgatacaggttcttttttctcgagttcagtcaacaaaatcgctcctttatttatatgtgcgaatttatatgcactatatttcatctattatatcgtatttcatatacattctgattgcttgaaatcgatttttttagaaatgcctgtttatgcagtcattccctgtttcttactataagtatacctgtaaacaacataattttcctcagacttaagacctagagaacgacatgctgaaggcggattcttcgtatgttacgtatataaattatgttcttctatccttctgtactcaatcttttgacatacaccctttttcaatgtgataattatattgcgcccactcctatttcttcttgcgcgctacgaatgctccattttgaaatgccaataacaccgtttcaaacatttcatcttcttctatcatttttttaaactcggctaattcatttgcatgagaggttgcgttatcaacaacaagaaaaccctttggttgtaaaatgcgttttatatgctcaagccaccacatgtattgcgtacgctctgaatctaggaaaataaaatcaaatgaatgatctaattgcgcatctaaaaatgcccctgcttcttgattatgaacatcaatcctttgtaaaaggtttgccttttcaaaattgacaagtgcctctccaactcgttctgaagaaagctctacagttgttacatttccatttgtttcttctaccgcattagctaaccacaatgtagaataaccattagaagttccgatttctaaaatgttttttgcgctacacccttttactaaaattgataaaaattgccccatctcacgagtaatattccgtaatttttcttcccttgtttttttatttcgatcatgctcttctccatattgttcaagttgaaataataataaatctaacgtatccattttttccatcgcctttccaaagcaatatgatgaaaaagctcttgctgcccgtctactttcattatatgcgaaacaaaaacctttttcctgttatatgacaaagatttgaatttttttatagcatattgtttcgttttttggtaaagttaatttctacgtgcaattattccattcatattatttcatattaaaattgcagttattaaattatataaaccccatttaaatgaatcggtatttcaaattcaattaagcgcccttttcggacgcattttctttgtttatatatttccagaagaaaggatgcttacaaatgaacgtgattagcttagatgctgctagaaaacgaaagcagcataaaaaattaatgattactataccgattattacacgtatttatgaagaagacggggaaattaaatttgaggtagctggcgaaaaagatgtacctcttgaaatgttagaaaaataataaaaaacgcatttctgaagaaatgcgcttttttatatttttacatttaaatgcataagtttttcagggttaaccatcatataaatatttgaaattttctcatcctcaaatacaaacgaaagaacataagttactttattatttattgtaactataactcctggtataccattgaccattttgaaatcaacagtgtactcttctgtcaatcgttgtgcaatcccaaagaacaaacgtataattcgatccgcagaataaatcgggttaatcgcagtcgtaactttaccaccaccatcagctttgagtatagcatctgtttttaatacttctaacataccttccgcatccccacactgtaatgatgatacaaacttttcaacataagaagccattttctccgtgcttaattttgattgcttcggtttctccaacatgctttttcgagcacgttgaaagatcttcctgcagtttacactactcttatcaacaattgaagctatttcttcgtattcataactgaaaacttctcttaatatgaaaacaatcctttctacctcagataattgttgtaaaagtaataaatatgcggtggaaagggattctttcattataaatgactttgatggctcatcactctcttctacaattggctctggcaaccacatccctacatacacgttacgtttatgcgctgccgatcgtaatttatcaattgaacgatttgtcgccatcttacataaatatgctttcatattttctatagattgaggatcttctatattatttagcaagataaatacatcctgaacgatatcctcagcatccataacactcccaaggattctgtatgctaacgaaaataataatggttgatacgcttcatataactgctccgtttccatgatgaactgcctcactttcatattgctttaaaatgtataacgctgcacgcttcccgcttgctaccgcagcatcagctaatacttcatcatgccctacccaatctcctgcaacataaacacctggcatttcaggtatattagggcccgctttttcaacacggtcaatatgaggaaaatcatgtactactgttattttcggtaaatattgctgtgcaacaacttctcttttccaatttggatgtaacaactccatcgtactttccaactgttctttatcatcacgaatatgattcatctcgagtacaggattatagtacttaattagactcactacaattgatccatcttcacttaatttagctgctctcgattgatttgtgaaaaatataggttgatctaatcctaatacaaattgatgtgtaggattgggtaattgtctcaagccaatatctaatgcagcaacagtaaccggtacagattgttcactccatctatgcaaacttgttccttctgcaccttttattattttacaagcttctttcggcggagtcgtcacgatgactgtgcctacttcaaaaacctcatcatcaacacaatgtattctttgtttaccttcggaatgctcaatttccacaacatgctttttagccaaaaactgcaccccgatatcattcgctatagctcttaattttgttattatcgtctcccaaccaccatctacataaagcactccctcttttatagaaagctgtatttgctttagtacagatgatgctaattgtattgtaggagcaaacgtatatgttgttgttcggcatagcgcataaaatatattgcgaaccattggatcttttatttcattttctgcccatgtagttagactcattttcggaacttctcctacatctaaatttcctaaacgaatcataagacgtgagaattgtacttttgcagaccaagaaagtagtggtgttgataaaattgagtaaaaatctgttgggatagtgaatatatcccctttccatattccatgtgcttttgtagatggtattccacctggaagagtcataccaagctcattaaaagttataaacgctgccccgcctctatataaagcatgtgcaccaagattcatgcagatttcatttttatttgtagtcatccctcggccaccgaattgactggacttttctaatacaatcactttccttccagctttcgctaaatatatagatgctgttaatccagcaagcccaccgccaacaattgctatatcaaatgtattcataataaaatccctccttaatcgttctacatacaagacgaacgattaaggagggatgtgacataaaaataaatttttattatcctactttatttcattactttttaattcgatcatattgcatacgaaataactcaattgcaaatggaatatcctcttcactctttaaataataactaatccatcctgattcaggtaatacgtgatgtggttttaccaagccttgcttcactaattcatctcgctttaactttggaaatggtaaatcagctaatttatcaccatgaagatggccaagttctttcttgccataatttatttcaataccaccaaatcgatgcggtttttcagaaacacccgcccagctgagtacttcatttctaatcatttcactaaatgacatgaacattcactccttataaatgattgatgtaattttaaattaacattttcattacttttttccatcaatccaaagtatgaatgggaatacgaatatagtttggtcttaacaccttattctttatggaataagtgaatttattaagctaccgacaacagcacaaaacaaagactagacacatatcctaattttgtaacctaacttacctatagaaaggcgggtaatacaattgactgccaacatcgactatacctccccctcaaccaattttacttatgatgtaaataaaagtaatttttttcggaaagatgcccaaaattatataaatgtacttggtattaaacaattaaatactttagaaaatacttctttattagatatttatttaagtacaggaaatgttgtagaaccacatattcatcaaaatgcagctgaacttgtttattgtatttcagggtctgctgttgtttctttacttaatccatttacgaatcaaatattaaacttaccgataaaacccgggcaagttgccaacattccacaagcgtggtggcattatgaaattgctacagcaaataatactcatttattagctattttcaatgctccagcgccagaagttattttcggttctgacattttaagattaactcctgctcatatgatggcacatacttactgcctcaatgaacaacaatggaaacaagcggtttcccctattcaatcaactactgtaattggtcctccgtcaaactgcaatcaaaaccgtgaaatgaaaaattatccaacccagcccctcgctcaacaacataatccgcatcaccaagattcttattacttccctctttactggggctattaatttgtaaattttcaaaagaatcatcatttatctcctaggaaaataccaaggagatttttttattgtatcttctcttcctattaaaaatagtaacaattgatagtggacatacatataatatttatatattaaattggaggtgatagtactatgagtaattataactatcgaaaaaactactcttataataaaaatagtagttcttcagcatcctctcaatcttccaattcccaatcgcaaagagacttagcggagcaaggctatgtaaagaaaaaaggatgtaactgtaataaaaataaatagtttatcttatggatgaattcttttttaaaagaattcatctttttttactgatcggaaatttttaaagttacataacttattacttaaatgagaaagggtaaattatacttttttatacgaacttaacaaagagtaattgttcaattaatttattacttattttcctaaaaaatatagtccttcctaaatttattaggaaggactatatacaaacccctgtttaatttcctactaaacattgtaacaaattaaacgatattaatacctgcacttacaaatccagcaactgcagctattggacttgctgctgttaatgaaacatataacagtattttatccccagctgctactggaatagcttcaggtatgattcctgatgctgtagaaccaatcgctattgcggcaaatgctggcgttaataatagaggtgcaccttgtactgtaaacgtattgcttgctgcaggtgcagttaatatttgtatttgcacttgaacaggtgataatggagataatgcagctgttgcactaaagaaacctgctaatgacgtaatagttcctgcgcgtggtgctacaaatgcataatcacctacacctaatgctaatgtgatacttgttccacccgttaacgctataccaggctgactaaatccaaatccgagaagagttcctgtattagctactaacgcattaactaatgctgctggtgttgtacctgaagcaaacggaataatagctccgccaccagttgcacctgttgctcctgttaagcctgttgcaccagttaaacctgttgcccccgttggacctgttgctcctgttggacctgttgctcctgttgggcctgttgctcctgttaaacctgttgctcctgttaaacctgttgctcctgttgggcctgttgctcctgctcctgttgctcctgttgctcctgttggacctgttgctcctgttgctcctgttgctcctgttgctcctgctcctgttggacctgttgctcctgttgctcctgtcgctcctgttgctcctgttgctcctgttaaacctgttgctccgcctcctggacctgttggacctgttgggcctgttgggcctcctcctggagtagcaccaattaattgagttaataaatttaataaaagttgtaaacttgcagggtcaataattaaagagaaaaagaatggtgcaagagcactgtagaattgttgtaataaagaaagtaattgacttagatttgggttaggagattgtagtaaattaataatactttgaattaattgttttaagaaattcccttctggagaaggtgctaattcatttagtaagttcaatagttgagtaaacaaattgagtaaagctaatctgtttgcatcacttggatttgcaaaaaacgctgcaatagccgaaattaaagagtttagtaaagtaattaatctacctaattgctcactagtaatcggaactgtttgtggattgttacaacactctggagtgaaaacaatcggattattgcagtggttatgaccgaaacaattattacttgtcatttatgtcctccttacttgttttatatttgagtttttcctattataaggatcataaagttgtaaaagagtatgtgttatatattgacttaaaataggaaacatgaaatataattaaacttgcaaacgctatttaattatgttcatgactcacatattaattatatgtttttaataattgactgcttagattaaatacctaaacttaagagtttattttatttttccacgtttatctcttaggttcaaagacacattttaatttgaatacaaaaaccgaatttacgattaacatatattccgcaagtaacaacatcattttttcatataaataaagaacatttccttactaaaattgggctcaccttataaaggtgaagccgtttctattataaaaaactctcatacaatatagtggacaagttattttatacttcgttctaataaaatattgtaaggagtgaaaattaattgcctatcattcaaccatttatggcatctagaagatttacatccacactaggagccggcacaggtacaggtgcagcttttgcaattgctgccacagcttgtttaaacgatgcgggtactactgcaaccgcttttccgactttcacgtattacaacttatatgtgaacggtattcttcaaccaagcgtgaactccagtgttactactggtcctactggtgctattacaattcctggtggggatgcattagacggcggaattccaattacaattgaatttatcgtcacttaatgttaacgaatgtaattcagaacaaaaaagacagattccttttcattaagaatctgtcttttttaattaataataataaattgtaaaataattgaagcaccttgcgatggtggttggttatccaataaagttagtttaccagtactaacttcatagaatggttgtggttgcaaaattccattgataaacaaatttatatacgaaacctcagtaggtgatagtatattcgttgtaccatattgagctatgccatctgcatctgtatatataagtttctctccatctgaaaaagtgtaaaataacaaattagttgttgttatagggccaatccccccagtaggacctgttgctcctgttacacccgttgctcctgttgctcccgttactcccgttggtcctgttgctcccgttgctcccgtttctcccgttactcccgttggtcctgttgctcctgtttctcctgttgctcccgtttctcccgttgctcccgtttctcccgtttctcccgttattcctgttattcctgttgctcctgttggacctgttgctcctgttactcccgttgctcccgtttctcctgttgctcctgttgctcctgttgctcccgtttctcctgttgctcctgttgctcctgttgctcccgtttctcctgttgctcctgttgctcctgttgctcccgtttctcctgttgctcctgttgctcctgttgctcccgtttctcctgttgctcctgttgctcctgttgctcccgtttctcctgttgctcctgttggacctgttgctcctgttgatcctgttgggcctgttgatcctgttgatcctgttgggcctgttgatcctgttgggcctgttactcctgttgctcctgttgctcctgttgctcctgttgctcctgttgctcctgttggaatatatattggtggaagagctgaaaatgtaggtccaatattctcaggttctatcttacctttatttattgataatttatcattccgcttcaatttaattcctcattccacatatttttaattaacttacataagtatgagtctattattaagaaatgctttcataactattcttttttccttccaaatgattcatacatatattaaacattttaccgttgctataactcctattaatataataaaatgatagttccattccaaaaacacgaaacttattgcattctaatttaaaaatgaggtaatttatactcaagataaaaatgaaaaaagaatagaaaaactagtatcaacgactcttgaaattattcttccatacagacttactgaacctaccagaaatactgggtcaatagttacaacaaactctatgttcgctaataatacattaggtgatcccatcactgtgatattaggcggaactaatattcctctttctaataaccaaagcctcggtaattttacaattaacgcctcaaacgatatatttacaattcctgtaaccagaagatagcatttaacctatcaagttaatacgacaactgctctactcgctggaacaaaactactattaaacgcttctactccacttcctggttctattttttctcccgctatatcaacttcaaattataacaataatttaattgccgatactacaatttcacttcaattattcgacgtattatacatcgttaatttggttggaggtggttcaacaggtgcctctctaacaattatacgaatcgatttaaaaatgattcattctttttctaataaacattattaaatactaagtctgtcatgataagaacctcccaattatttcataaaagtggtggcgcattaaagaacaaattgcactatattcatagtagaaactatctatactaaattttccgtatatatattatcaatttacactgacttccaccgatgttacattaaatatgaagacagtttcttttttacgaaccatctcaatacgtatttgagaaacgtactccaatcctatacgcgagagcaatactatgttgacactcagatgagtgtctttttttgtgagtaataaaaaataaaaaccatctcttaaagatggttttatcttttgttactataaatgtaaacttatgcagttggataataaattgtcatgcttaatcgagtcaaagattcccctaaattataataagagtgtgatctatcggccttaaaacgaattgaatctccactatttaatttatattgacagttattcaattttactgtcaattcaccttcaaataccgttataaattcttctgcgccttctttatgcccttctgaacttaatttcccttctgtttctatttccactgtatacatttcaaaatgtctatcatcttgaaatggaaaagaaggatacactttatattttccattgtcttcagacaatacttgaatatcttttcttaaaatcactttcgtatcaggctgaggattattgattaaagaagtaaaagaaactttcaagccatttgcaattttccatattgttgttagtgtcggacttgattcccctctttcaatttgtccaatcattgttttacttacacctgttaattgagagaccttttctaaacttaatttttctttttcacgtattgattttaaattttttgccagaataagttgaatttcttccataaaaaacactcctacaccgcatacaatataacgaccgttatgtataataaaaagcacacgttatattgttctttttgatcattataacatacaaaaattgggaggttttgaaatgcctatattttcttttttgttatttgtatttataagtagcttcacacctggtcccaacaatttcttagctatgacatacgcaaatcaacatggattaaagagaagcataaacttttgctttggagtagcattcggttttttcatcctcacttctttatgcagtttctttaatattgttttaattaatattatccctataattgaatttcctttaaaaattttaggtgtcgcgtatatgctatatttagcctttaaaataattactagtaaaggcggtgcagatcacaatgaaaaaaataataaaaacttatttacagtgggtattttcattcaatttgttaatccaaaaggaatattattcgggctcacagtagtctctacttttatactcccctactacaattcatattcaagttttctgcttttctcattatttctaggtatagtcggtttactaagtacatttagttggagtttatttggttcaatattccaaaaaatattagtaaaacataaccaattattcaacatcattatggctgttttattagttttcagtgccgtttcaatcgttatacactaattcgatgctcattttagattttgtactttttaataccactctttatcaatcagactactttatatactaatccatccacataccctatgtggtttaaaacttttaagaggaaaccttctaacaataggtttccttccatatcatattaaataagaagcaggttaaatacggaggtgattttgattaagactactttaatttctcatttttacaatgaagaatatttacttccatggtggttaatgcaccatacaaagctatttgatcatggcattcttattaatcgtggatccactgatcgttcagttgaaatctgtaaaacattcgctcctaattgggaaatacgaaactcaaaatcactcgaatttgatgcttatttagttgatcaagaagttatggaaattgaaagagaaattacaggatggaaaatggtattgaatacgacagaattcctgtgctgttataataaagaacaatttttcaaattacttagcactatgggtggcaatatgttttcaataagaatgattatgatgattgatgaaccaagttatggctacactaatccaagatatagctctccgcttgttaaacaacgttatcacggcataataactcaacctaatccaaaccaactatatcttaacggtagattaattcacaataattcgcacgggaactatagagtcgggagacatggttcgcattatccttatagcatttacatggaacctgcttttatttttaaatttttttatagtccatggaacgatgcaatgaaaaaacgaaaattacaaattgggccgactctttctcaacatagtgtacagcgtggactaggttcacatcacttaacaacaattgaaaaattagaaacaaaatacaaattctatgcaactttaactacggacctccggttattcccagaataccaaattatatttcctgacctttatccttaatgtcatgaatatttagtttccacatccatccgttttttattaacatatcaactccaactaaatatttttctctagtagaaatctgagctaggactcttgctgcgcgcagattcctcttatttaatgtcgtatcaccagcctataatctttcataccatttcattgagtacctgatgttggattagaaataaaaaatggcaattcatttggaaaattttcaatttcagattatataccttctaaaacaaagtattaaaacaatagaacctaaactaatgtcttaagttatggctttatttttttcttattattcactttaaaatctttttataataatattgaaaaatacagtataatataaattactgttctttgggagggttataatgtctgataagtataaaattttcattcttattgttaccgcatctttttctttcttttccttaataaaagatttccgcaacacttcaaaaagtttcttttggggtagttttgtaattcttacaagcttcataatacttttaacactcgctttagatttaactcaaatactcctatattcagcgcaaattgcgcttgaaattattacaataccacataaactctttctaccatctgtcactgaagccgctattatttactaaaaaagtattttaattttcttatgcatgccaaaatatattttggtaaatttgacacacatttatatcaaacaagcatattttattgtatggtgactatctaataatacaaatttttaattttcataagatctttttatttttaattaaaaatttacaacattctaaaacagtatgcacataatatcctccattccctttttcaacatgacacttgtctcagagcgcctttaaaagcgctctttatctttaataaaggttttattaaaatttaggttaaaaattaataccctatagtcataatagctatttactgtttccaaaataagttgcattaataatatagaaatgaaatacctataaaaattattactttactatttctttaaacatgctagtgaggtgatttcgatagattatcaaaacaaagatatgttcattaacttttcacttttagatattaaccgtattattctcccacattctcctactggggctaccggctctactggagctactggagctaccggacctactggagctaccggttccactggacctactggacctaccggttccaccggacctactggctctactggttccactgggactaccggggctaccggttccactggacctactgggactaccggggctactggctctaccggacctactggacctaccggttccactgggactactgggactaccggggctactggagctaccggggctactggctctactggttccactggacctactggagctaccggttccactggacttactggctccactgggactaccgggactactgggactaccggggctaccggttccactggacctactgggactaccggttccactggacctaccggggctactggctctaccggacctgctggacctaccggggctactggctctactggttccactggacctactgggactaccggttccactggagctaccggggctactggctctaccggacctgctggacctaccggggctactggctctactggttccactggacctactgggactaccggttccactggagctaccggggctactggctctaccggacctgctggacctaccggggctactggctctactggttccactggacctactgggactaccggttccactggagctaccggggctactggctctaccggacctgctggacctaccggggctactggctctactggttccactggacctactgggactaccggttccactggagctaccggggctactggctctaccggacctgctggacctaccggggctactggctcttagtttgtctagcatctaaaataaaaattgacgtttcacgttgtttgtttcgttcagttttcaaagaactacttcgtcgctcagaggcgactttattaatataacatttcgttatattttcgtcaacaacttttttcaataagttgtttttcgtttgttttgtttgttacctttcgtggcaacgaatataaatataccagtttgattattaaaatgcaatagtttttctaataaaatttttaacttagtaaaaaagtataaaaacagcacatttcttctatataaatataatttctcgcactatcaagatttactatacccacgcaactcatgctcaaataaaaaaagctttggagaaatctccaaagcttagtcttgtttatggcgcatagcagggaataataatacatcacgaatagatggtgcatttgttaataacataactagacgatcaataccgattcctaatccacccgtaggaggcataccgtactcaagagcttcaatataatcgtcatccatcatgtgagcttcgtcattaccttgttcgcgctcttttaattgcgcttcaaaacgttctttttgatcgattggatcatttaactcagtgaatgcatttgcatgttcacgcgcaacgataaataattcgaaacgatctgtaaatcttggatcttcatcattctttttcgcaagcggcgagatttctaccggatgaccgtaaataaatgttggttggattaatttatcttctactttttgttcgaagaattcatttataatatgaccaacttccattgtatctttaatttctacattatgttcttttgcaagttcacgcgcttcttctacactcatcggattccagaaatcagctccagagtattgcttaatcgcatctaccatatgaagacgtgtccattctggttctagattaatttcataatcaccatactggattgttgttgtacccagtacttttttcgcgatatgagcaaccatatcttctgttaacttcataatatctttataatcagcgtatgcttcatataattcaatcatcgtaaactcagggttatgacgagttgatacaccctcattacggaatacacggccgatctcatatactttttctaaaccacccacaataagacgctttaaatgtagctcaattgcgatacgcatatataattccatatctaacgcattatggtgtgtagtgaaaggacgcgcagaagctccacctgcaattgcatgcatcataggtgtttccacttcaagataaccgttgtcatctaggtatcttctcatctcacgaatgattttactacgagtaacgaacgtttcacgactttccatacttgtaattaagtctaagtaacgttgacggtagcgttgttcaacatcttttaatccatggtatttatctggtaatggacgaagagatttcgttaatagcgtaaagcctgttgcttttactgaaagttctccaacgtttgttttgaacactttaccttcaatacctactaaatcacctaaatctgctgttttaaataattcgtactcgtcatctccaacagcatctttacgaacataaatttgaacttgtccatgtaaatcttgaacatgtgcaaatccagctttcccttttccgcgttttgtcataatacgaccagcgatagaaacagcgatttccttctcctctaattcctctttagagaactctccatatagactcactaagtcagttgttgaatttgtgcgttcaaatcttttaccgaacggatcaattccttgttcacgtaaattatgtagcttttcacgacgaacaatcaattggtcgtttaattcttcgtggttcatgttatccatgatattgatatcactccagctctatttaattttacaatatatacagtatagcattttctactcaactagaaaaactgccagcaactaactggcagctcttctttctttcacgtaattataggaagtgtatagaagaatgtcaatctcctatgtccattattaaccaacgtaaattgtttgttgtttcgcttccacttcttctacaaatgtacctaacacattcgcaaggtcttcccgtgtgttacaagcattaataccattacgtacactcgcattaccacgaacaccttttaaataccaagctgcatgttttctcatctctcttacagcgacactttcattctttaagtcgataagacgatctagatgcaacatacatacatcaattttctcgcgcactgttggttccggcattaattcacctgtctccaaatactttaccgtacgataaatcatccacggatctccaagagcagcacgaccaatcataacaccatctacaccaatttcatcaagcatacgctttgcatcttgcggcgttgcgacatcaccatttccgataaccgggatatttacagattgttttacttgtttaataatatcccaatccgcttttccttcatacatttgcactcgtgtacgtccgtgaaccgccacagcttggccaccagcacgctcaacagccctagcattttctattgcgaaaatatgttcttcatcccaaccgatacgcattttaactgtaaccggcttttcaacagcatctacaaccgctgctaccatttcatatattttattcgggtctaaaagccaccttgctccagcatcacatttaacgattttcggcactggacaacccatattaatatcaattatgtctgctgtcgtatatttatctacatatttcgcagcatctacaagagtttctttttctccaccaaaaatttgtaaacttaatggcttttctctctcgtcgatatataacatatctaatgttcttttattattaagtaatattgccttatcacttaccatttcagcacaaactaatccggcaccaaattcttttactgttaaacggaatgcagagttacacactcccgccatcggtgctagtacaaccggatttttcatctcgatatttgcaatctttaacaatcaatctactccttcctgtacaatcactttggcattaattcctctatcgaaacatttaatgccttagcaacttctactacaaaatcttgagaaggcgatctattccctctctcaacctcacctaaaacagatacagatacccctagtgctttagcaaaaccttcttgtgtgtaaccttttagctttcgaaaagcacgaatgcgccttccccatttttctgcttccataccgttactccctctcgccttttcatttcttctacttgtgaacatgaaatgttttgttttatgtcttgattaatttctaacaacggaacgataacaaaagctctttcaaacatccgcggatgcggaacaataagattctctgcttcaatattctcttgattataaagtaaaatgtcaaggtcgatagtcctcggcccccacctaatttccctttttcttcctaggtcattttctactttttgtgttactttcaataattcttgtggtgataaattggtagaaatttttataactaaatttaaaaagcaactttggtcagtatagccaactggctcagtttcatatacagatgaaatatcatcaacctgaatataaggatttttatttaaaaactgaatcgcttcggttagatacgtataacgctctccaatatttgatcctaatgcaatgtaagctatattgttcatggacgttctctcgtaatttctactgctacagcacgataatgacccggtatcggtggatccggcttaattaccttaattgtacagcgcgaaatactttcatattgttttaatatatctgcagcaatattttcagcgatactctccacaagcttatactttctatcctcaacaacttttctacataattcgaaaagctctccataattgaccgaatgctctaagtcatcactttcccctgcacgctttaaatccaactccaccgttaagtcaactttaaatctctgacctaatttattctcctctgggaacacgccatgataaccataaaactccatatcatggatataaattttatccaattaccttacccccttaccaatcatcgcatccatcattttagccatacgcgccatttctttcacatcatggacacgaacaaactcacagcccttttcaataccaagacaaacagtagctcccgttccctcaaggcgttcctctactggcaaatctaatacgtgcccaataaaggactttctcgaagtacctaagagaaccggataacctagcacatttaactgttctaaattacgcatcgcctctaagttctgctcaggtgttttagcaaaaccgatacctggatctaaaataatattctcatctcgcacaccagcatttttagcaattttaatactgtcatacaaatcagcaatcatatccgccattaaattacgataattcatgtcatcgcggttatgcattaaaatgatgggtacatcgtaatgagctgcgacttcagcaattttcggctccgccttcgctccccaaatatcattaataatatgagcaccagcctcaattgcttgctttgcaacttcagctttatatgtatcgatagatataggcaattttacttcttttgaaactgcttgaatcatcgggacaactcgctttatttcttcttctactgatactttagcaaaacccgggcgagtagattcgccaccaatatcaataatatgagcaccttcaccttgcatttcttttgcgtgacgtaccgcagcatctacctcgttgtaactcccaccatcagaaaacgaatctggtgttacatttaaaatccccataattaatgtcttttcatttaaattcaatgtatattcgccgcagcgtaaatcataatcccacttcaaactacacatctcctcttcgtaattcatttttgctccataatttctctctttgcattccataaaggtacattaaactttttgtaaccactcctactttacccgggaaatcctgcgcttctatacgataaagcggaacaatttcttgaatggagtttgttacgaagacttcatccgctgaaagcagctcatcttttgtaaagaaaccttcctttacttctatatttaattcttcagcactctttataataaacgcacgagtgataccatttaaaatccctgtctctaacgaaggtgtatataaaacatcacctttcacaaaaaatagattggaaacaataccctctgcaacataacctgcttcagtaagaaaaataccttccttactcacaacatttccaatttcacgcttccctaaaatattatttaaataatgatgagacttcagacgaaatgttccttccggtgtatttcgcacttgttttagaataacaccttctttttccactacatctcctggagctgttaaaggttttataaaaacaataaccgaaggctcttcatacatttccgtttgtaatcctatttcatctatacccgctgatacattaaaacgtacatatgcatgcttcaattcattcttagcgagtaaatctttcaaaataagcatcacgtcattttttgtcattgtccatttaatttgcaatgtatccagcgcttctattaaacggtcataatgatcatccaataagaaagggtgaccattataaatacgaaacgtttcaaaaactccaagaccatataaataaccatgatcataaggagaaattttcgcttcacttgcttctacatactgaccatttacgtaaattaacataacgttgcacttggactgtatttacaaatgaaattctgtaacaactctttcccatgagaagtcataatagattccggatggaattgcacaccctctatcggcaatgtcttatgacgaagtgccataatttctccttcctctgtccaagatgttacctctaagcaatcgggtaacgtctctttcttaacaataagggaatgatagcgcgtcgcagtaaacggattaggaatatccgaaaaaatcgtctttccatcatgatgcataagcgacgttttcccatgcattaatcgttctgcacggacaacctctccaccaaacacttgtgcaatggattgatgccctagacaaactccaaaaatcggaatctttccagcaaagtatttaataacttccatactaatccccgcttcattaggactacatggacctggagaaatcattagaaaatctggtttcatattctcaatatctgaaatggtcacttcatcgttacgtttaacaacgagctcttgtccaagttctccaagaaactgcactaaattaaatgtaaaagaatcataattatcaatcattaatatcatttctctcacctaaccgtttcttcgctacgttcttttgcacgccataaagcaatcgccttttttaacgactctttatattcattttctggatttgaatcaattacaattcccgcccctgcttgtacatgagcttttccatctttagcaagaagtgttctaattacaatattcaattctgtatctccagaataaccaatccaaccgattgaacctgtataaatccctcttcgaacaggttctaattcctcaataatttccatcgtacgtattttcggggcaccagtaattgttcccccagggaatacagccttcactaaatcaaaagcatctttatcttcttccacctcaccacgcacattagaaacaatatgcataacatgtgagtatttctcaattaccataaattcatctacttctacagtgccatatttacaaacacgtcctaaatcatttctttctaaatccacaagcattacatgctctgctctttctttttcgttctcaattaattctcttgctaattcttcatcctcttgctcatccgcgcctctagatctcgttccagcaattggtcttgtacttacttcagttccttgtttcttaattaacaactctggcgatccactaacaatttgaaaatccccaagctccaggtaacccatatatggagatggattaatttcacgaagacttgtataaatttctagtgggtgtgtctgtaacgttctttcttgtctcgtcgacaagtttacttggaacacatcacccgccccaatatattcttgaatacattcaactgccttcataaagccggcttcagtaaaagcaactgcttcacttttcttttcaggactttcaaagggcacagtcacttcaggcgcttctgtcatccaaagactcttccactcatttagccgttcttttgcctcttcatatttatctacataatgcgtaataacccataacacttgttctttttgatcatagacaaatacgtcatcaaataataaaaagaagatgtcaggtatattaatatcatcttccgcaagagaaggcagcttttcaatataacggatacagtcataactgaaatagccaattgcaccaccttgaaaaggcggatactctgggttatagtccgtcttccattgttccatatattcttgcattaaatctaacggattccctcgttttattgtttccttaccactttcacttatatgtaacgtttcatccttccctcggattaccgctactgggttcagccctacaatgttataacgaccgccacggccactttctaacaaaatatgttgcgatttaccctgagaaagaaatttatattgcttaaagaaatctaactgatatggaatagaaagcgctaaagattttcttcgttgcatatcaacaccccgtcttcttttatcccaccctcttagattaaccagctcaaactacataagttatttatatagagattgattatactcgaaggctagtgaaaataatttaattatactacctcttattttacatgaagttttctagtcattcactcttttcctatttccaatcccaaaagaaaaagcaccctttttcaaggatgctttttcaatcgcgtttaattatgattcaaattgataaagtggtgtacttaaataacgttcaccgttactcgggataataacaagtacctttttccctttacctaactttttcgcaacttctgttgctgcataaataactgcgcctgaagagataccaactaaaataccttcctctttagccactcttctcgcatattcaaatgcttgctctgttttcacttgaataatttcatcatatacttctacatccaacgtctccggaacaaatcccgccccaattccttggattttatgtggacctggtttcccaccagataatactggtgaatctgcaggttctactgcataaattttaatatctttatacgcttccttcagtacttcaccagcaccagtaatcgttccacctgtaccaatacctgcaataaacgcatctaattggtcacccatttgttcaataatttctggacctgttgttaaacggtgaatttctggattcgattggtttttgaactgttgtggtataaagtagccatgctcttttgctaattcagtcgctttacgaattgctccacccattccttcaggccctggagtcaatactaattccgcaccgtaagcacgtaataaattacgacgctcaatactcattgtttctggcattactaagattgcattatatcctttagcagccgctaccatcgctaaaccaattcctgtgttaccacttgtcggctcaatgattgtatcgccctcttttaataatccatttttttcagcatcttcaatcatagctaatgcgatacgatctttaacgctactccccggattcataaattctaattttaagtatatatctgcgctgtctgattctacgatgcggttcaacttaacgatcggcgttttcccgattaattctgaaactgattgtgccactcgcattcctgtcactcctaacaccgagtatttttattggttttatctatatttagattttgtcagaaaattccctgtttgtcaattcatttggaggattgctcctcttaattcccttattacaaattctcgattaaatttgtaatatcttctttagagaacttgtatcgttcattacagaaatgacagtgaacttccgtctcttcctcttcttcacgaacttgctctaactctgttttacctaaactaattaacacactctcaatacgctcgcgtgagcatgtgcaattaaattgaacatccattgtttctaatacttttactttatcttctccaagaactgcatatagtagctcttccggagaaagtccttgttcaatcaacgttgatacaggtggaatcttttgtaaacggtcttcaataaatgaaatcgtttcatcttgcgcacccggcataatttgaaggatgaatccacctgccgctaatatgctatcatctccatttacaagaacaccaacacctacagaagaaggcgtttgttcagaaactgcaaaataatacgtaaagtcttctcctaattctcctgaaacgattggagattgaccaataaacggctcacgcattccaatatctttaattacagttacaaacccctctgtacctaccgcttgatatacacgtaacttcccttgttctgttccttcaaaatcaacatgcggattcgttacataaccacgtacatctccatttgcatgagcatctactaagataggaccaatcggaccgttaccttctaccttaatcgttaacttttgctcaccttttaacattgcgcccatcattgtacccgcagttaaagaacgccctagtgccgctgaagctgttctccatgtatcatgacgtctttgcgcctcacttactgtatttgttgtacgtacactatacgcacgcacttctccatcaaacgctaacgcttttactaaataatctttcatacgtatttattcacctttctcatgctgtaaatttgcattacgttcatataacatgtataaaccttttaacgttaaaaatggatctacaatatcaattacattcgattcttcggaaattaattttgctaatccacctgttgcaataactttaggttcttgtctagcttcttctttcatacgcttaacaataccttccacttgtccaacataaccataaagaatacccgattgcatcgcacttactgtatttttcccaactacactgcttggttttgtaatttcgatacgaggaagttttgctgctctgctatataaagcctctgctgaaatcataattcctggcgtaataactccacccatataatgcttttcttcgttaatataacaatatgtagtagccgtaccaaaatcaacaataataagcggacttccatataagtggattcctgctactgcatttacaattcggtctgcgcctacttcacgcggattttcatatttaatatttagccctgtttttatcccaggccctactacaagcggtttaattttaaaatatttttcacacatgcgctctaaagcaaacataattggtggtacgactgaagacacaataatacctttcacatcttcaaacgaaagaccttcatgctcaagcaattgctttacaagcattccatattcatcttctgtcttatgacgatctgtttccatgcgccaatgctgacgaagttccccctcttcaaacacacctagtacagcatttgtgttccctacatccaatacaaaaatcatattctcaccacttatcttatttaatctatatttgtgcagtatgtataaaacttataaaaacatcatatcacacatacttatataatcagctttcctatcctcatcattttacaaaaagattgctctctatttcaatttttaatactagttttacttaaattactttatccactaagttctcaatagtaattaacaaaggttttaacaaacaaaaaaggagtgacgatagtcactccttcgtttcttacttatcttctttatcttcatcgtctttcttcatgttgatgtttactttcacatcatctgaagatgttggacgttctggcaatctgccgtaatcacataaatgattgatttgctcagcatctaacgtttctacttcaagtaacgtttttgcaataagatctagcttatcacgattttcagtaagaatgtcttttgcacgagcataacattctttcataatcgtttgcatttctacatcgatatcgtgcgcaattgcatcactgtagttttgctctgaatggaagtctcttcctaagaacacttgaccaccttgcgaactaccaaattgcattggtccaagcttatcactcataccgaattctgtaaccatacgtcttgcaatgcccgtcgcacgttggaagtcgttgtgagcacctgtactcacttcaccaaatacaatctcctcagctactcgaccaccaagtaaaccagtgattttatcaagtaactctggctttgtcatgaagtaacgatcttctttcggaagcattactgcatatccaccagcttgaccacgagggacaattgttactttatgaacgacatcagcttcatcaagaacaacaccaattacagtatgacccgcttcatggaaagcaacgatattacgttctttttcagagataacacgacttttcttagccggacctgcaataacgcgatccgttgcttcatcaatatcactcatatcaattatcttcttatcttgacgcgcagctactaaagcagcttcgtttaataagttttcaagatcagcaccagagaatcctggcgtacgagttgcaattgctcttaagttgatattctcatcaagcggtttattacgagcatgcaccttcagtacagcttcacggccatttacatctggacgatctactgtaatttgacggtcaaaacgacctggacgtaataatgctggatcaagaatatcaggacggtttgtcgcagcgatgataataataccttcgtttgcaccgaatccatccatttcaacaagtaattggttcaacgtttgctcacgctcatcatggccaccaccaagacctgcgccacgttgacgccctactgcatcaatttcatcaatgaaaatgatacaaggagcatttttctttgcattttcaaataaatcacgtacacgtgatgcaccgacaccgacaaacatctctacgaagtcagaaccactgatagagaagaatggaacgccagcctcacctgcaacagcacgtgctaataaagttttacctgtacctggaggtccaactaataggacaccctttggaatacgagcaccaacttcagagaacttacgagggtctttcaagaattcaactacctcaacaagttcttgtttctcttcatccgcaccagcaacatctctgaaacgaacttttttcttttcatcattatataacttcgccttacttttcccgaagttcataacacggctaccgccgccttgagcttggtttaataagaagaagaataaaatgaagatgatgacaaatggaatgattgaagtaaagaatgttacccaggcacttgtttcttctgctggttgatacttaacttcggcacctttcgctttatcattaattttcttttgtaattcctcagtatttggtgcataagtaacaaattgttctccttggctagagttattaaattgtccttttacctcaaatacaccatttttcggttgaagttgcacattacgcacttcaccgctttctagtttagtaatgaatttgtcgtagctaactgatgtcgttttttgtgtcgaaccattaaaatagctcacgattccaattactactaagaatatcagtaaataaaagatggtattacggaagatacgattcattcctaacctcctctcacggcataaacactatagtaaatcgtaacatagaaaaactttcctatacaattgtgaagcctatatttaattaatttgagtaaacgcttggttttaatacgcctacataaggaagattacggtactgctctttataatctaatccatatcctactacaaattcatgtggaacagtaaatccaacataatccgctttcagatcaaccttacggcctgttggcttatctaataatgtaacaatttttacagacttcgctttacgatatttgaataagtctactaagtagcttagtgtaagaccactatcaataatatcttcgacgattaaaatatcgcgaccttctacagaagtatcaagatcttttaaaattttcacttcgcctgttgaaactgtagagtgaccgtaactagatacagccataaaatccatttcaagatatgtatctgttctctttaataaatctgccatgaatggcattgcgccttttaatacaccaattgcaagaggtactgtgtttttataatcctctgcaacaattgcacctagttcgcgcaccttttcttgtatttgctcttcagaaattaatactttttcgatatcttgattcatcatttcattatcctcccggaagactccttgcttttgtagtgaataatcatatatttatccttctttgccatctctttcgaaattgcaaatgcagatcgcttcaacaagggtacccaaataatggtcccacttgcatcacaaacgaccggccattcttctcttttttctttcggtacttttgcttcgataaaaatagcttttatctttttcgtgccattcataccttgtattgacatgcgatctccattttccctagaacgaatacgaagtggatatgatatatcattatacttagcaacaaatactgtttcattcatgttacttggtatatcttcgctcacctctgttacaaattcatccccgttcaatagcgtaatggtcccgggtactgataaatcttgtaaaaaaggagaaacaatttcttgtttaaatctaaagctacactcctcgtatgtacgaacaattttcaaatcacctggaaaatcaagtgaacctgaaggttgtgtccgcttaaaaaactcaatcaccttgtcaatatgtatggaagaaagagaagatggaatcttatattcataaagatagtttaatattagttgaatccctcttctttgtaaaggcatagacatggattcaaaggcaggaattgataagctaatttgtttatcacttttttttgtaattactttattcattttctcaaaagctaattcctgcaaataagcctcatcctcttgcatctgcacgctaaatttttggaatttctcatgcacttgtggattttcttctttcaaatgaggaaggacatatttacgtaatcgattccttgtatatacttcctttttattactcggatctatacgtggcattaaatttagcttattacagtaatcaacaatttcttccttcgttaccccaagtaacggcctaattaaatacccattatgaaaaggacgcttcactgcaattcctgcatatcctttcggagtactccctcttacaagacgcattaaaattgtctcgacttgatcatctccatgatgtccaagagcaacatatcttgcatcatatttcttcattattctttccaaaaatgcatatctgcattctctagcagcaacctgtgcattcattccgtattgctgttgatattgtgatacattaatccttatcgtttcacaaataattcccagttcttcacaaaggccctgcacaaaccgtaaatcctcatgagattcatcacctctaaacatatgatccacatgagctactacaattttcaactgtttttccgctcttttttctaataaataatataaaagcgctaacgagtcaggaccaccagaaactcccacaacaattgttgaatcattctttaatacatcatgctgctttacaaagtcatctactttttcaacaaatgtatctttcaacttcgtaatcacctttcattaaacaagaacagcaacgttagttgccttgtctacaatggtacaacttttacaaacattgtgcaaaaaaaagatatacaaaaattacatttttatcttacatcctccgtgtatattcacaaaattaataacattacctttttccacaaaaaaacctaggtattcacctaggtttttaaaatcaaattatagataaacattccacttacattttactgcgcctgcattcctacaatcggaatcgtagcccacttcggcatatttttcttcacttttgccactacaatagtcatatcatcatttatataaccatcacaagagcgaatcacttcttccataatgatatcagcaatttcttgcgggtcttcggtttgcaattctttaatttttcgtttcatccacaattcatgattctccacatgctgtgctccttcaaaaatcccatcgctcatcataataagaatatcgcccgtttttaattgttcacccaccacatcaacttcaacatcttcaatgattcccatcggcaaattacttgcttcaattttcaaaatattatttgcgcgtttaacaaaactcggcgtcgatccaatctttaaaaaccttgcactcgcatcccgcaaatctaccatagctaaatctaacgtcgtaaacatctcttctgtcgttctcaaagaaagaattgaattgatagacttaattgctatttcttcatcaatgcccgattggagtattttttgtaataatttcaccgtttccttactttccatatgagccctttgcccattccccataccatcactaattgcaagtgcatatttaccaacacttaaatccatcatcgcataagagtcacccgaaacaaatccaccgccttttgcagctgtagccaatcctgtatcaagagaatacgtcttcgccgaaccaaatgatattaaactatggccatttggataagaagacttttcttcatgtttaacgacaatattttctttaaggatatccgaaagcatcggtgcaactaacttttcacattcaccatgttcattagatgcaactggaattaacatttcaatatcaatacttcctctatctaaacaataaatatcaacatgctctacttcgacaccaaaatcacggaatgcttgcataatctgttcttcctgcacttgatgattttcacgctctcgttgtatctccttagcaaaatcctccataacctttgatacacctaatagttgctccgctactattctacgattttccttcatttgttttcgtaatttttgtccctcatagaagtgatctaattcacccgctactaaatccgtcacttttttccctctcacacaatgcttgtcccactcacgaactaatttacgattatgttgcagggttccttcttccgtttcattcattatttgtttcatataatcgtacgttttatcaaaattcactacccagcattgatcctttttaaagcatgtttgacatgttttcgcagtaattgtactcaaaaacaaatctgcttctgtctctttatcttcttcctctacatacccatatacagaaaagctattagataaagcagcaaatacatttgcaaattggttgattttatttgctgtaacatcacgcatccttcttaaatattgttgttggtcttgcgaatgctcttgtgtacctggcataaatttagcaatacgatccaaaacaagcttcggtgttaataagaagataacaatcgctacacctgactcaattaaagttgttacaatatttgtctgtttgtccacatataatgtaattaagcttgtcccaattaataaacctaaactaacacctaaacgcttcccttcttttaacaatccaccaagcaatccagagaaagcaagaaggctaagctgagacaagctagacacatttgctaaacttaatattagtcctgttacaacccctactgtggatcctgtggcagcacctgcaataaatgcaaatactagcactaaataccttgtaaaaatatgttgaatagaagcatcatatacaaaccaatctgttgtacccgttaaaacagatgctagtaatataatcaaacaaacaatttcttccgtctctaatgcctgttgttttcctttcctttccactaaaagcgggacgctttgtaaaaatatcatagttaatacgaaactaagcccagcctcaatggtactaacgagtaaatcgtacatggtgacagtttgttgcgcaaaatatacaacaactaagtgtgcggttaatgcggagataaatacttgaaatggaacaagtccaacagttttacgtgtaaatcgactaaagaagatattataaatgaagaaggtaaagatagatgcaaaggtaaaaaacaaattatctatcgataccgaaagagctcctcccattagagctaaaaatgctagcggcatcttatcccgcttcataacataaacagcagcaaaaaatggcagtgcaaacggtaaaatatttgttaatatatatgctcgtcccaaaagaaaaccaataacaacaataataaatccccatctaaagaaaacttgctcaaatttcattcgcaacttactcgtccactttattcctccaagctgactctcattcattgccaatgcacttgtattcatagtattccttcctgctttaggcatatttttaacaccacctgcatagtttaattactgtcattataaaagatgattgttggtttttttgtcaaaacaacagttttcacttttataatcgttcgactttttattcgaaataactctacagatatacacggtatgtaagttatttttgagattttaattaaatattcagaaaatatagggtgattttgtagaagtgttgtatatcttaatttatttaacaaaaaaagatcatgcaaatttgcatgatctttttagatgacccgtacgggattcgaacccgtgttaccgccgtgaaagggcggtgtcttaaccacttgaccaacgggccgttaaattaaatatagcggcggaggggatcgaacccccgacctcacgggtatgaaccgtacgctctagccagctgagctacaccgccatgtcgtcttatttaacggacaattagtatcttacatcagatactaattaaagtcaacacatctcaaaaacttttttaaaaatatttttaacatataaaaaagcaccctgagccatcactctgggtacctctctatatgttaaaaactaaacgtccttattatccgcgacgcgcgccacggccaccacgtttagactctgtgttacgctttaaagaagttaaacgatcttcgctatcttttaagaagcgtgccatcttttgctcaaatgtttctttcggagctcggtcgttaccgccaccgcgattatctctgttgaaagagcgattattacgttgtggacgtccagaacgttgttgatcaccaccgcgttggtattcaccgcgtggacgatctccttctgttttttcacgttctttcgcttttttgatagataaaccaatctttccatctttttcaacattaataacttttacttctacttggtcgcccacttttaagtgatcgttaatatcttttacatagttatcagcaacttcactaatatgaacaagacccgttaagccctctggcagctccacaaaagccccaaaatttgtaatacctgttactttaccctgtaacttgctgcctacctcgattgacataaaaaaaatgctcctccttagtggttaaaaagtcaaattttactttattatatataatcctaaaatatagtgtcaataagacatactctacttagaaacaggaaaaattatctcccctttaccagagaagaaataatcccttctagcaatctttaatacgtactcttcatcatttaacttttgaacttcgtcttttagacttttttctttattcgttaatgaatccagttcttttttcatgtccttaacttttgcttcttttgctttaatggaactgttttgttgataaaacgttacactaatactcgcaataattgtaaaagtaaagacaagaaaaaccgctaaacggcgataaagtcgcttcctgttctcatccgtttgtattatatgctctttaacaggatttggactctgtttttcgattgttctttgtctcagttccctcatttccgaggtccccctaacttcttttttatatgctcccatagttggaagatatgtcccttcaattttgctatatattgcaggaaccctatatgtttcactataaaaagtttaacacgattagggagaagtttccatatgagcgaagcaataaatcgaacaggccagaaaaaaactttccatatgaaaagtaatatccaaatcaccattttccataacacatgtccaattgaaagcagtatacgaaataagaataatataaatgcaataaatagctgcgctataataataacaggttttatcatgagtagctgtataattcgaacaaaaaaatatgttgtttgcataaaaatatagatgagaaaatttaacagcttcatgtatagtgccttcagtaagctttgatatgccgcaaaaccacataataatgccaaaaacacatatatacgtagctcagcttcatttacgagaagcaatacataaaagacggataatgcttggacaatccaaaataatatatcatgtataaatacaagccaacgtttacgttcttggcgctttaaaaaacgttgatatgtatctaaagacgctccaatccaagcacccattccaatcattgaaagcattgtatacaactgaattgttaagctcatttaaacaacttactaaagaaacctttagttttttccccttgattttcatcaatatacagcatctcattaactttccctttaatcgacacaatacctttttccacatctaaatttttcatttgtaaattttgaccacgaattgttaaaaaacccattacggtctctagtaaaaactcttcgctatcaaaactctctacctgcttcacaccggtaatatcaattatacgcctgccacgcataataatgtcatgctctacagaaacattttgttgattagaagacgtaggtgagtaaccattattcacgtaaatccccccataggtttttactagctaatagtaatgtatgaggggataaatgattttagaacaagccttcttccgcttttactttttcttcacgaactaagctatacatatttgctgcatcttcttttttagttgtttcttttaattcatttattttcacagtcactattttttgaccaaaacgaattgttaattcgtcagctactttcacatcagaacttgcttttgccacttgaccattaatagatattcttccttgatcagctacttctttcgctaatgttcttcttttaattaaacgtgatacttttaaaaacttatctagacgcatatcaaatccccctattaacgctctgtctgtttcgcttcttcccataaaacatctaactgttctaatgataaatctttcatctctttattcatttcagctacttttgcctccatgtataaaaaacgaccagtaaatttctcattagttgaacgtaacgcctcttctggatctattttgtaatgacgagctatattaacaaatgcaaatagtaaatcaccaaactcacccagcatctttttctcatccatatttgtaacctcttgttggaactcttgccattcttccaaagctttctctatcatcggttgcacatcaacccaatcaaatccaaccttaccagctttcttctgaatttcataggcgcgtagtaactgcggcaaacttttgggaacgccatttaaaacagattctttcacgaatcctttttcttgttttttaatttcttcccaatttgcaatcacttcatcagcgctgtttacatccgtatttccaaacacatgcggatggcgacgaaccattttctcagatagagttcgaatgatatcatctatagagaaccaaccttcatcttctccgatttgagcatgaagcataacttgtaataatatatcacctaattcttctactaagtgatcatcatcctcttcatcgattgcttccaacacttcataagcttcctcaattaaatatttctttaatgattgatgtgtttgctttttatcccacggacaaccatttggaccacgaagttccgcaataatttctctaagaacatcaaactgttgatacaaggacgcacgctcctgaactggcggcacgtacacactcgttaaattattcaattccgtttcatgatctaacatgtacaacggtaccttctttacttgttcaaatgaagttcctgcagctgttacgatatacacttcataatcatctggtaacatctccattaatgttaatttcacatcagatgcaacgaatgcatcatatacttggcaaaagattaaatgttgacgcagttctaattgccctctttcaaatgatgtagcatcaagtaattggaatccttcaatcggatcaatctttagacttgcaaacataggatcaaggaaactttgtccaccctcaattcgcacttcaacatttgaaacttctcctttttccaacagtagctgaactgttctttctgctacaagtggatgcccgggaacagcatagataatttctgtaccttcagcttgttctagcaatttattcgcaattgtttcatatacaatttcaaacgtatcatgtgcttcatatacagcatcaaaagacgtatattgtacgccttctttctccaattcttctataactggatgttctttcgttctaacaaacagatggtctgcttcttttatttttcgatatacacccatcgttagctgatctaattcaccagctcctaaacctaaaatagtaatgattccactcacaaccagtcacctctatccactcttcttcaatgaaccttcttttttctcttgtttcataacggttcctaattctttttttgtaaatacacgtaatttcaaaataaaaaacatatatgtcaatccgccaatggctacacctaacaacgcttcaagtgtcgcgcttcctctatgttccatatcaattactaatccagacatctgtaacacacgtgtgaacatcattaatacaaatcccatacagataccactaattactatccctaacatatttcgcttattgataagtgaccctgatacagctctcgtaagcaacaaagtatttagtccagagattataattaacgcacataaagtcgcaaaggctgcacctttcacaccaaaataaggcatgaatatataatttaacgctaactttaagcaacctccaaatacaacaaataatgctggcttaaacgtttgccccaatccttgtaaaatagaagctgtcgtaattgacaatgaactaaataaaatagataacgataaaatagataaaacatctgatccatcactgttttcaaacaacataatattcgtaggttgaataatacaagttagtccaatagctgctgcaagtccaataacacatgttattttcactgctaactttaccttttcttgaataaaggaaagatctcctctttccttcgccgctgtaataatcggaataagtgacaacgagaaagaagtcgtcacaacagtacctaattgcattagcggaatacttctatcataaacaccctttaatacctttgcattttcagcctgttctcccgcaccaataagtaagctgtaaaaggacactgaatcagccatctgtataaaaataagcactaaattactaacacaaatcgctaacccctgccaaaaaaggattttaactatcttccttttacccttaattctcgctgcacttttgaagaatatagaacgaaaatcttgacgcatatacaatataagtacaataatcccaataagaccacccgcaattgagcctaacatagctcctgcaccaactgtatataaatcaaatccgtgagcaattaggaatagcgataaaaatacaataatagaaactcgaattgtttgttctattacttgcgaaacagccgttggcatcatattattaaatccttgaaaataccctcttgctacagacaaaaatggcatcaataagaatgaaaatgaaataacacgtagtaacttatctaagtgtatatcgcccatagctaccgcaattgtttcggccccaaaaaacaatgtaaagaagcctataaaaccaattcctaataagaaccaaaaagatacacaaataatttcttctgcttctttttgttttccccgctctaatcgttctgcaaccattttcgaaatgataacaggaaatccataagtagctaaaattaaacaaaatccataaaacgggtaaatttgttggtaaatataaaacccaatatcccccgctatattttgatatggaatacggtaaaaagcgcttaatacttttgtaacgaaacttgcaatcgttaatataatagccccacgccaaaaggcttgatacttcttcgcttccatacaagaaaactcctttttctattctcacctctcgtattatatcataaagaaaagaacaaactcccttcccaacacgggtaataatgagttcctacacgttaaaaatattcaacgaaaaaaggtagcaaagtgctaccttcattcaatatacatatatctccaaataattgatttctcaaaaagaaagatcataattaggaaagattgctacttctaaaatcaatatacccttactgttccatttgtttcgctaagaaactggcagcagtattaaccgctttatgctcgatctcgcttataatagcttcttttgaaaaaataatgacggctccaatcggatctccgtttgcaacaattggtccaactgtataagaatgaaccttttctgttacaccatcaataatggaaatatcactttcatccgtcataataacagactttcgttcttccatcgttttttcaattaaatcgccaacacttttatttaagtattcttttttcgatacgcctgatactgcgatgatagaatctcgatcacacacaagcacattatgtcctaagctgtcatataaagcatcagcatattcttttgcaaaatcacctagctcactaattggagaatacttctttaaaattacctctccatcgcgatcaacaaatatttctagtgggtctccttctcgaatacgtaaagttctacgaatttccttcgggattacgaccctgcctaaatcatcaattcgacgtacgattccagttgctttcattctaatgctgcctcactttctactgatgatcaaagtggtgaatttacctgttcatgtaaaaatcaccaactgttagatatagtattttacacattagttcttctatgcacgtcgaattgtatttttttatcttattttaggcatttattacttctttttttacatctggtaagccttttaataaattttcagcaatcgttaaccacttcgatgtctctaagccatttgttttcataacaattttcaattgtgatccttccattcctaaaccaatcatacgtccaaaactatttccgagcatgaataattttccaccatcaatattttgacttgcttgttcagaaaacaggaatgttacttcaaatttattctgcttaattaattcaatttgttctttcattgccaacactttaatatttgcaatttgtaataaataaccaacttcttgtggataatcgccaaatctatcgatcatttcttcctgcaattcttcaatatcctcaattgcagaaacacctctaaattgtttatacatcataattttttgcttactatctgaaatataagcatctggtaagtatgcatctacctctaagtcaatttcaacattaactatattttcagccccatctgttcctctacgctgttcaattgcatcttttaacatttgagaatatagatcaaatccgacagaatcaataaatccatgctgttctgcccctaacaaattacctgctccacgaatagataaatctctcatcgcaattttgaaaccagatccaagttccgtgaactctttaattgcttgtagacgcttctctgcaacctctgacagcactttgtcacgtttatatgcaaagtatgcatatgcaacacgattagaacgtccaacacgcccacgaagctgatacaactgtgataatcccatacgatctgcatcaaatacaattaacgtatttacattcggaatatctacacccgtctcaataattgttgtacttacaagaacatcatgctgtccttctaaaaatgatagcataacagactctaattcgctttcgttcattttcccatgtgcgtaggttacgcgggcatctggaactaacatcgaaatttcatctgcttttctttcaatatcctctacacggttatataggaagtaaacttgaccacctcttgcaagctctcgctctatcgcctctcgcattaacgctggattatactcgactacatacgtttggactgggaaacgattttctggtggtgtctcaataacagataagtcgcgcacaccaagcatagacatatgaagcgtccgcggaatcggagttgccgttaatgttaatacgtcaacattcgccttcaattgtttaattttttctttatgtgtcacaccaaatctttgttcttcatcaataataagaagccctaaatctttataagtaacatctttagataaaatacgatgtgttccgattacaatatctactgttccatcctttaagcccttaattgtttcattttgttgtttcctcgtacggaatctacttaataagcctatattgattggataatcttgaaaacgctctcgaattgtttcatagtgttgctgcgcaagaatcgttgtcggtactaaaattgcaacttgtttttcatccataatcgctttaaatgccgcacgaatagccacttcagtcttcccataccctacatcaccacaaaggagcctatccatcgggcgtccgcgttccatatcttttttaatctcgtcaatagaacgtaactgatcctctgtctcttggtatgggaaagatgattcgaactcttgttgttctgccgtatctggcgtatatgcatagccttttgaagcttcgcgctcagcatatagtttaattaggtcatccgcaatgtcttgtacagatttttcaactttcgttttaacctttttccaatcattaccacctaatttgtaaactttcggatccttaccttcagatcctacatatttttgaacttgatcaatttgttcaattggaacgtatagcttatcattaccttgatatttaatatttaaataatctttatgaacaccattaatctctaatgtctcaatacctaaaaatttacctataccatgatttacatgaactacataatctccaacttttaattccgaataacttttaatacgttcagcattcgatagcttttgtttacgttgtgattttttaactttcttatgaaaaagctccttttcagtaatgacaacaagcttttgcatcggcatttcaaatcctgcatgtaaatcacctacagcaatttgtaaccttccaggcaataaaatatctgtaccttctacaatatctgcctcaatatcataatcacttaaaatatgttgtaattttttcacacgttcatcatctgttccgagtacaacagtcgtaaaatgcccttcattccatctatcaatttctgtttttaacaaattcatctgtccatggaaatcttgcattgttttacatgttacattaacaatattttgcggatgtgtgtgtgcgatatgacgcaagaataacgttaaatatacaaaacttctttttttatgatgaagaaacccctcgaatgggtgagagaaagataaatcttgaataattgttccttcaccaagaagtgatatataccattccgcctcttctgtttcaagatgtgatgctgtttcttgaatacgggaaatctcatctaaaattacaacaccatcttctggtaaataatctatcagactagcaggttctttatagaaaatagataagtatttaaacatctgttctatactttgcccgtttttcaacatctcaatttcatgacttaccgtctcaagcactttagtctttagtttatcatcagaaagtttttgcatcgtcttagtcaagccttcttcaagatgctgaattcctgattttaattcttcctgtgaaaataaaaactctgttgccggaccaaacctaacgttttcttttttaccttgagaacgctgttcatccacatcaaataatcgaatagaatcgacttctgtatcaaagaattcaatacgaaatggtagttcttcagttaaaggataaatatctaatattcccccacgcaaactgaactcccctggagcttctaccatcgacttacgttcatagccaatatgatgtaaagtatgcaagagcgcatctaaatcaatctcttgccctagattgatttcaacttgcttttgcttccacaattcttttattggtaaaaatctacgcaatcctgccactggcgctacaatgattccattctctcccgcagccaagcgatttaacacttctatacgttgcgccttcaattctggacttgcaactccaatttccgatgctatcagttcattcactggatataaccacacatctttttcaccaagtaacgccactaaatcttcatgtactttttgtgcttggtataagttatgtgtcacgattaattgtgatttttttgtttttttatataaagccgccattaataatgaacgagaagacgttgccatccctgatataagttgttcttttaacccatcttctaacccattaataaccgattgtatctcttcatttttataaaattgctctaataaacctatcatttttaaaactcctctcaacataaagagcaagtcattctattttatgcaaatattttggaaaaggaaaacagaaaaatgctttggacatgccaaagcgacaacattttattgcagaaatttttcatactcataatactcaggataagatgcgagcgtttcttgacacgattcacaaatcgtttttatatatatatttccattctcatgaaaatgaatcatttctactacttcttgctccgttagttgaaataaaacgtcgctatatactttttctgcgttaatggagcctacattacctccgcagtgtctgcaataataatacccttccatactagcctcctaaaaattcaattactactagtatgggtaaaacaaaagagaaatattcccaatctcatttttaactattgaaagtattcatgatttgaagaaaaggcttatttagccactcttcacatgcatccgctgctttttcaatagaatggttaacatccggaatctcttcagatgtaaagcgtcctaatacataatcgactaccttcattccatttttcgggcgatcaattcccatacggatacgttgaaattcttgtgttcctaagtgcgaaatcgttgactttacaccattatgtccaccagcactacctttcatgcgaagacgcaatttacctacaggaatgtctaaatcgtcgtacataacaacgaagtcctcaacatcaattttataataatccataagtggacgaatactttccccagataaattcatgtatgttagcggctttaataagattaccttttctccattaacaaaccctgcaccaaatacacctttaaatttttgttcattcaaagaaatgttccaacgcttcgcaagttcatcaatggccataaatccaatattatgccttgttaattcatattctctacctgggttcccaagtcctactatcaatttcattcttgtaccactactttcttttttcgatacgaaaagacgtaaccaattttggttacgtctcattctatccaattaattgaataatacactcacagattcttcttcgtatacacgaatgattgcttctccgattaatggagcaactgaaagttcatgtactttgtcgattttcttctcttctggtaatacgatagagttcgttacaactaactctttaatgtttgaattttgaatacgctcaattgctggaccagataatactgggtgtgtacagcaagcatatacttcagaagcaccgttctcaacaagagcgtttgctgctaatgtaattgtaccagctgtatcaatgatgtcatcaattaaaatcgctgttttgccttcaatattaccgataatgttcattacctctgaaacgttcgggcgaggacgacgcttatcaataatagcgattggcgcttttagacgatctgccatttttctcgcacgagttacaccaccatgatcaggagacacgattacgatatctttaagaccttttgtttcaaagtaatcagaaagaatcggtacacccattaagtggtcgattgggatatcaaagaacccttgaatttgtggagcatgtaaatctagagtgattacacgagttgcacctgctgtttcaagcaagtttgctacaagtttcgatgtaattggttcacgagaacgcgctttacggtcttgacgcgcataaccatagtaaggaataacaatattaattgttttcgcagatgcacgttttaatgcatcgatcataataagtaattccatgatatgttcgtttactgggaagcttgtagattgaataatgaatacatcgcaaccacggatactttcttcaatgttaatttgaacttctccatcactaaaacgatcaacagaacattttcctagtcctactccaatatgctttgcaatctgctcagcaagttccttattagagtttaaagagaatactttcaaattagaatttagatattgagtcgacatctagattaaccctccacattattatgattttttcttattcagcaattgatcaacatagtcttctttgttaacttgacgtgcacgtgctaccgataatgcttttgatggaacattctctgtaattgtagagcctgccgccacataagcaccatcttcaactgttactggagcaacaaggtttgaattacatccaataaataccccattaccaatcacagttttgaatttattcttaccgtcatagttcaccgtaattgaaccacaaccaagattcacgtcttctccaacttgtgcatccccgatataactcaagtgtgaagctttacttctattaccaaagacagtttttttgatttccacgaagtttccaacgcgtacttcgtctccaataactgaacctgggcgaatatgtgcaaatggaccaaccgatacttctgtaccaagcttactatcatgtacagtagattgtcgaattgtcgtacgatctccaatttcactatcgcgaattactgtatgcggtccaatttcacaatcagaaccaattacagtgttcccctcaataattgttcctggatgaagaactgtatcgctaccgataattgcatcagcagaaatataagtgttacttggatcaataattgtaacaccatttaccatgttctttcggttgatacggtttttcataataatttccgcttgcgatagagcgactctgtcgttaacacctaacgtttcatcgaactgctctgtttgataagctgatacgatatgaccttcattttttaaaatctcaataacatctggaaggtaatattcaccttgcacgttatcatttgaaactttagaaagtgaagcaaataaagccttattatcaaaacaatacgtacctgtattgatttctttaatagctaattctttctcatttgcatctttatgctcaacaatcttttcaacatgaccattctcattacgaacaatacggccatatccagcaggctcttctatgtatgctgttagcaccgtcgccattgctcctgcttctttatgttgctgaagtaatgcttccattgtttcagcagttattagaggcgtatcaccacaaataactaaagttgttccttcttcatttgcaagtacacttgcagcttgatctacagcatgtgctgtaccaagttgttctgcttgtaatgcaaattcacttacgttccctagctgttcttgtaccatttcagcaccatgtccaacaaccgttacaagtttctgcaatcctaattgagatacttgatcgactacgtgttgtaccataggttttccacatacaggatgcagcactttgtatagcttagacttcatacgtgtgcctttacctgcagctagaatcactgcaaatctgtttgacatatagaccctccatcgcaacctatttatccattaaagatattatcctaaatcatcatatatttcaagaaacacattttaactattaaattttaccataattcttataagatgttttactctttagtatcttttttaagaaataagctatactatttaaaatgattttgaaaaaattagtagtttcttctttttatgttaataaattatacagtttccaaatataaagcaaaaaaaacaaacccctgtaaatgcttacaggagtttgctacaaaattataaggctttttgtcaaaagcccttttcattcgaattttacgaagcacctgcttcttcaaactcaacctcttctaactcgcctaaacgatgatactctgttaaaaccgcatcttgaattttagagcgtgtaccagaattaattggatgtgcaatgtcacggaactctccatctggagtacgtttacttggcattgctacaaataatccattattaccatcaattacacgaatatcatgaacaacaaattcatggtctagagtaatagaggcaattgctctcatgcggccttctgtgtttacgcggcgtaatcttacgtcagtcacttccatcttgtgttcaccacccttttctaaataagcgatatatttgtataaattccacaaattttctattttccctttaattttttaaaaatttttaagataaaaatttttaaagtagttgaatatagagattagtggaggttatcgcttacaaaaggttacttaactagggcgattacttcaatttcaacggaaacatctttcggtaattttgctacttgcacacaagatcgagctggtttatgagtagagaaataagagctatacacttcattcacagcattaaaatcatccatgtcctttaaaaatactgttgtttttacgactgtatcaaatgaagcacctgcttcctctaataccgcttgtaaattttgaaatacttgttctgtttgtactgttacatctcctgttacaagctccccatttgccatcaatggaatttgtcctgagctatagaacatgttatttacaataatcccctgtgaataaggtccaattgcttgtggtgccttgcttgtttgaacaactttcatacttttcacccttttattatttattttactctttaaaaatagtgtacgaaaggcagtttgtccatctattttataatctataaataaaataaaaaagatagagctatctgctctatcttttattccgcctctacaagcccttcatcaaatggtgcaagagaataattccctttttccacttgaatcgttttttctttcacatcaacttccgatagacgaattaatgatacaaaattattaattagtcgttcttcaatatctgtggattctactaatacaccaataccaacaacattagccttgaattcttctagcatactcatcataccttgaattgttccgccagctttcatgaagtcatcaataattaaaacattcgacccttctggaagactgcgttttgctaacgtcattgtttgaattcgtttagaagaacccgacacatagttaatactaacagtcggaccttctgttaccttattatctttccttgcaattacaactggtacatctaagtaatttgccactgcataagcaagtggaatccccttcgttgccaccgtcataactgcatcaattggttgcctagcaaaaacagaagcaaacaaacgacctgcgccattaatatggcgaggattactcaataaatctgtcatgtataagtaaccgccaggcaaaatacgatctgggttttcaaataagccacaaagctcatcaataattagatctgcctcttcttcacttatatacggtatatatttcactcctcctgctgctcctggtatcgtttgcaatgtgccgaccccttgttgttcaaacgtttgcttaataataactaaatcttcactaatggaagacttagccgattgatacctttcagcaaaaaaagtgagagatactagctgacgagggttttgtagcaagtaataagtcatatcgactaatcttgtacttcttctaattttcatactctcacctcaaatcacgaatattctaaacaaatcataacgtattatacgtctttattcaagcgtttctcgctctcctaataaacgtaccgcatagacttgttcacaaaatccttttaatccgttataaatgcgatgcattcgtgaatcatggtgtacaagtccaaatacagttggaccacttccactcattaatacagcatccgctccaaatcgcttcatctgtgatttaatacgggcaacttcaggatgcattccaaatgttacatcttctaaaacgttaccaacagtatcacaaattcctttataatcaccagaatttatgacatcaaccattttatctacatttggatgtgtaactcgatttaactttaaatttccatacacatcagcagtagatacacctatatgtggtttcgctaaaataacccaacaagaaggcggagtctttatatgctcaattttctctcctcttccagtggcaattgctgtgcctccgtatacacagaacgatacatctgatccaatttctgcaccaagctctgctaactcatcaattgtaagctctaaattccataatttattaagaccacgtaatgtcgctgctgcatcactacttccacctgctaatccagctgctactggaatcgttttttcaatagtaatagatacacctttttttacattaaacttctcttttaataatttcgctgcctgataagctaaatttcgttggtcgtctgggacataccgattatgggataaaatttcaatacggtcttctgctaattccgttagttctagacgatctgctaaatcaatggttgtcataatcattttcacttcatgatatccgtcttgtctttttcccagtacatctaacgacagattaatctttgctggtgctttcactagtagcttcaatctattcacccactctatgtactcaatcttttatcgtttattttaccataaatttatagtaagacgatgacacttccctaattataacgaaaagcattcagaatgaaactacttatgtaaaatgatggcaccttttagagtacaaaaagccgaggaatgtctcctcggctaccgtagcacagaaagtatcttacaactactggtttcgtttcattaattgctgttctgcaatttctatagcacgtttcaccatgttaccagcatctttcgcacgaattccgccccatccttctttctgaacaacatcataaaagccaagctcttttgctagctcttctttaaattggtttgacatgacacctcttcgtctactcaatgcagagtccctccttattttgctacggtatagttagtatgcaaaataatatagcttttcatttatgggaatatatgtaatgatatatggattataaaatgacctcattatgagggtctccataaaatgttaactctactgtctctgttaaaacatctgcataactataagatacacgttgcaacgcatcttcttgttgatccaattgtacaacaaaaacggaacggtatgtttctgctagtacacctgattgctccacagtttttcttcttccactatttgcttttaacataagtcgctgtccaagatggtgatctaattcgcttttaatttcatctaaacgttttgacatatacttcgctacacctcgctgtaatttagattgaacacttaaagcacgatatatctatcctaattattaaccgcgattcacagctaatatcatcctgcgtttgaatagatagaagaaatactatattgtaaaagtatcattacgtagtctttacgttcttacctctttttatccaaattcatttaaatccttccatacaaaaagcaagatacatatgtatcctgcttactcttcgtaatgttgaaaaggtaatcccgttcgtaaaatccctctcgtttcaattccacctagtcccttttcaccagtaattgtattacgtacgacatcccatacattgactctctccataaatgaagtaaaactaattttaccaactacatatacaggatctagtgcatgaatattaattctagatggtgaactagcgaaattggcccctgcacgaattagtgcctcaaaatgtgattgacatgccccagcaaaaataacaagttgatccaatgatggatatttttttcgcacttcacgaacagcctgtacaaaatgccttgaatgcctatatgccgctaaatctcccttcactccttttgattttgtatatgcatcatgccctgtaataacgagaatgtctgggcgaaagtgatctattaagtctactactttttcatgcatcaccgtttctttacaatgaataccttgaacaggaacgccaattttattatataaatctaagcacttgcgcaaatataaagggtctccatctatatgcaatacacgtcccggcatttgaaaataatttacctcacttgtgtatccaccagttgaagtatgttcatgcctttgtttcatcagtacataatcttgttgaaacaaacgatacgtgcgctccattgtttctttctcacgcttcaccctttttttatgttctctttgatctatactaattaaatcttcaagtggcgcatccgccaccagtctaatttcctctccaaacaatatagctatctcgccttttatttctataatacgaaaaagaatatccctcttatgagaatatcgttccactaattctccaacatgtaaaaccattctcctacctccaaactcattaggccatcttacctgtttttaaagtatgaatttagagagcgaaaggtgacaaaagggacagttcaacttgaactgtccctttcatattcttatgataatttatgaagaactaatgcattacttaatgttgcaaactcttcaatagatagcgtttcgcctcttcgctttggatcaattcctacttctgttaaaattcgatccaataactccttatctttcgggaaaccatttaaattatttgataaattattcattaaagttttacggcgctgtgcgaaacttgctcgtactacttcaaagaaaaacgtttcatctgtcacctctacaaccggtttaggacgctttagaaggcggataattgcagaatcaacgtttggctgtggtacaaacactgtacgcggtacagtcataactgtttcaacctctgtatagtactgaatggcaatcgataaagaaccatactcttttgttccaggtttagcagctaaacgatctccaacttctttttgcatcataacaacaaatccacgaactggtaacttttcttcaagcaatttaaataaaattggcgttgtaatatagtacggtaagttagctactaccattacatcttgcccttcttcaaattgctcattaaatacttcatgtacatctgcttttagtacgtctttattaataactgtaacattaccatatggcgctaacgtctcatctaaaattggtaatagtctttgatcaatttcaaaagccactacttttttagcacgcttcgctaattgctctgttaatgcaccaatacctggtccaatttcaattgcaccactttctgaaccaatttctgcatgatcgacaatacgatttaatacatttgtatcaattaaaaagttttgtcctaaactttttttgaatgaaaatccatacttttcaacaatgtcttttgtacgatttggcgttgcgatatccttcattttttttcctcctgtattacttgcttataagcttctgcaaatgattcctttgaaacttgaaacatctgtaatcgtttatgtaactgttttgcatttgtataaccaatctttaataacttacccattctttctctgcggctctttgccatttctccgcccactaagcctgcatcgactaaatcactccaactaatttcacttgtgtaagcttccatttcttcatgtatattctctagagcacggcgaatcgactcattagaagcatgttcaatcccaacaccctttttccttttagcaagcgcttcttccttcggtaaaaaagcatgcttacagccaggaaccttgtcagaaataatttttcgaatacgctctccaggataatccggatctgtgaaaataataacgccccttttttgctgcgctaatttaacttgctcaataacatgatcaccgattgctgaaccgttcgtttcaattgtatccgcatcaacagcacgcttaatcgcaactgtatcatctttaccttctacaacgataatctcttttattttcatgcttgcctccacactcatttcgtctctacttagtaaaacaaaaaaatgacgacttttccattattattttccccattcttatattttaaaaaatagaatagaaaaatctttgttctctgtccttattgtaacacttcatcattcacatttattttcttgattacttctactagtttttctcaaaataaaaaagaacaggtttcccccgttctttttattcaacaccaaataaaacttttgcatttttagttgtcatttctgctacttcctcataagaaattccttttaaattcgcaatttcttctgctacgagttttacataactcggttcatttcgtttcccgcgaaatggatgcggcgttaaatagggacaatccgtctctattaacaatttctctaatggaatctccgtagcaacttctttcggtttcttagcgtttttaaatgtaactggtccacctaacgaaattaaaaagttcatatcaacacatcgctctgctacttctacgctaccgctaaagcaatgcataatgcctcctacttcagctgcattctcttcttctagaatatcgacaatatcttgagttgcatcgcggttatgtataataatcggcaaatttacttttttcgctaatgcaatttgtttacgaaatacttctttctgtatttcttttggagacttatcccagtgataatctaagcccatttctccaagtgcaacgactttaggatgagaagcaagttcttctaaccaagctaaatgttcttctgtcatgtcgattgcatcaactggatgccagccaaccgcagcgtaaataaaatcataggcttcagctaattccatcgccttttttatcgttacttcatcaaaaccaacaacaactgtataagtaactcccgcttctttcattcgggcaataacctcttgcaaatcttcttcgaattgctctgcattcaaatgtgaatgtgtatcaaacaacataatacataactccttttatattgaaatcaagtttattctacaaaaataagttctttaataacttaacgataacaatactacaatcttaatgcaaaaatagagagtgtaaaaagaaaaaagacgcttcacacatgttacacgtgaaacatctcttttcttgtcttaattacttgatttttgtaccatttggtagattttggtcaattgatgctaatgacaatacgccattctcttcacccgctaaaatcataccttgcgataattcaccgcgtaattttacaggttttaagtttgttacacaaataacctttttaccttttaagtcttccggcgaatagaattttgcaattccagaaacaacttgacgcttttctgtgcctaagtctagttgaatttttaacaacttgtctgcttttttcacaggttcagcagatagtacttcagctacgcgtaattctactttaaagaaatcatcaattgtaatttcttctgccttcggttcttcttcttttttctcttctactttaggagcagagcttttcatttgttctttaatgtactctacttccacttccatttctaaacgagggaaaattgggtttcctttttctacttttgttccagctggaatgcagccaattgtagatagactttcccaagatttatgagcttcatcagtaaggccaagctgagcaaacatcttgcttggtgctactgttaagaatggcataagcataatacctgtttgacgaagtacttctgctaaatgagccattacagaagctaacttttcacgatcattctcatcttttgctaatacccatggttgtgtttcatcaatatatttattcgtacgactaactagttgccaaatagatcctaacgctacagagaactccatattctccattgcttcttctacttttttcaaagtatcttgtgcaaacgctactaacgtttcatcaaattccgtcacattttctttaaatgcagggatttctccgttaaaatacttatcaatcatagctactgtacgatttaataaattacctaagtcatttgctaagtcgaaattaatacgctccacaaatccttctggtgtgaatacaccatcagatccaaatggaacttcacgaagtaggtaataacgtaatgcatctaatccgtaacgatcgattaatgtaactggatctactacgtttccttttgacttactcatctttccatccttcattaaaatccagccatgagcaaagactttcttcggaagaggtaaatctaatgccattaaaattatcggccaataaattgtatggaaacgaacaatttctttcccaactaaatgcacatctgcaggccagaattttttatatttctcttcatttgctgttccataacctaacgccgtaatataattagatagtgcgtcaacccatacgtaaataacatgttttgggttaccaggaacacgaactccccagtcaaatgaagtacgagaaaccgctaaatcttctaatcctggtttaataaaattattaatcatttcatttttacgagactccggctgaatgaaatgtggattatcttcatagaactttaatagtctgtcgacatatttacccattctaaagaaataagattcttcacgaacaagttctacatcatgaccactatctgggctttttcctccaactactttgtcgccttccataattggatctactaattgatgctctgtatagaacgtctcatcttgtacagaataccaaccttcatattcatcaagataaatgtcaccttgatctactaattgcttaaagattttttcgacaacatctttatgacgatcttcagttgtacgaataaaatcatcataagaaatatccatcttctcccaaagccctttaattcctgcaacaatgttatcaacatatgcctgtggcgtaatatttaactcttctgctttcttttggatcttctgtccatgctcatcagttcctgttaaataatgcacattataaccttgcatacgcttatatcgtgccatcgcatctcctgctactgtcgtataagcatgtccaatgtgtaattttccacttggataataaattggggtagtaatataaaaggacttattttcctctgtcattgttttggacctcccgaataacctcatatgtatttataaacagtatatcaaaaactcatatataaagtgaaactttaatcagtagggtttttgttcctccctactaattattagcccacattaattgggcttttacgagcagcccaaatctaacttatcttctttacgccaacctaattttaaatttaggtcttaatgctcgatatctttatcatctattgctcatatttcacaaaaatatacaatctccacttttaatttattattttttcagaaaataatgtaaataattgtggaatttcctctcaatctattatatataagaaataagaaatctataaatctttttaaaaaatatagaatttaagaattgacggaaatgtaaatgattggtatcatatgtccatagggtattttgtcgaaaaatgacgaatctaaaaatagactcgaaacttataaactatttatttaggaggaaaaaaattatgaaatctactggtattgttcgtaaagttgatgaattaggtcgtgtagtaattccaatcgaattacgccgtactttaggtattgcagaaaaggacgctcttgaaatctatgttgatgacgaaaaaatcatcttaaagaaatataaaccaaacatgacttgccaagtaactggtgaagtatctgacggtaacctttctttagctgaaggtaaaatcatcttaagcaaagaaggcgctgagcaaatcttaaacgaacttcaagattatatcgaaacagcaaaataagcttctcaattatgagaagcttattttttatcgacatgatagatttgatatacatctcttttcgacaaatctcgatctttagcgactgttttaatcgcttcttttgaattcatacttttttcatttatataatattcaatatgatcatataccgaaagagattcccaccattgttcttctggaacaggttcttctgttgaaccagctactaaaatacaaaactcaccacgtacttcattttgcttcgtccactcaattgcttcttcgattgtccctcgaataaattcctcaaattttttagttaactctcgacataatacaatctctctatttcccaacacttcctgcatcgaaattaaagtatcgtctaaacgatgaggcgcttcataaaacatcattgtagtttgtacataacgaagcttttctaactccatctttcgttcctttttgtttctctgcaagaaaccatagaaataaaactgctttgtttcaagaccggatgcaattaatgctgtaagggctgcatttgctccaggaagcggaattacatgatattgctcagctactgcctcaacgacaatatcgtaacctggatcagaaatacacggcataccagcgtcgctaacaagtgctacattctttccatcctctaatttctctaatagtttcttcccacttacttctttattgtgctcatgataactcgtaacaggtgtttcaatttcaaaataattacaaagttttttcgtttgtctcgtatcttcagcagcaattaaatcaacttcttttaaaattcggattgcacgaaatgtcatatcttctagatttccaataggagttggtactaaatataaaactcccttttcattttgttgaaagcttttttgttgccacatagcgttctcctttttgcatatatgcctctttttgttttctcgttaattgcttaaagtaatactccgcttgcatagctgtacgcttatcatcgtgggtctctacatattttaaaacaacaggaagcctgacgcgtgtatacttagcccctttgccgctattatgagtctgaattctcttttctatatggtttgtatatccagcataataacttccatcagagcactctaccacataaaaaaagtgcttattcttctccatataaaatcgaacgtagctcctttgtatattcgttattgctctcatatacaacgagaggcggtaaaattttcaaatctgcatttccatccttaattccttcaattaacaatgtatttgcttcttttccaaccttaggataaacaaattgcacacgctttggttcaattttatatttacgcattaatgtgacaatgtctagtaatcgccctggacgatgtacaaacgctactttcccaccttgttttactaactgactacttacagatacaacatcttctaatgtacacataatttcatgacgagctatcgctaaatgttcattcatatttttctctgaagtttgaggtgtttgaaaatatggtggattacatgtaacaacatcatattgatgacgcccaagtttctctggcatatctttcaaatctccatgtatgaggtgaattctttcctccaacccattgtattgaacacttcttactcccatatcatataagcgttcttgaatttccaccccagtaatatttccttttgttcttgtacttaatagaaggggaacaaccgcgttacctgtacacaaatcaagtaaattccccttttgaattggtacccatgcaaaatctgcaagtaaaacggcatctaaagaaaaattaaatactgatgggctttgtataatcttcatgtcttgtgctaataagtaatctaaacgttcatcttcatataaattcatatactgctccttttcttacccttaacctaccctatttcatgtataaaaaattacctttccaattataattggaaaggtaatttcactttttatttaagaatgacagacagaataaacaatctccctctttacgtacacttccataatgtagattgcaaatatgaaaaccttcttgatacagtctcgctaaattgtcatagccttcaccaatatctgttttcggcttcacttctttacgtttttgagttttttgtttttctttattctgcacttcttcaaaacggtgtcgcaaattgttattttccatttttatatgctggttttcttccaacaactctgcaagatgctgttttaactctcccaactgtttatataaatgtccaatttgctcttccatactagaaaccgattcaaaaatatcttttttctccacaagcacccacctcattaatctgtggtttgactcgaaacgacccctttattcactaactcatctaacgtatattctactatccgttccttgtctactagttccacttgaattaatctttctaaaatatttaatccgataacacggccagtaccatgcggggtttgtatacgttgatctaaatcaggaagttgttcctttgctgcctcatattcatcattctcatattttaagcaacacattaagcgaccacataaaccagagatttttgcaggatttaatgataaattttgatcctttgccattttaatggatacaggttcaaaatcccctaaaaaagtagaacaacaaagcatacgaccacatggaccaataccacctagcatcttcgcttcatcacgaacaccaatttgtcttagttcaattcttgttctaaaaattgcggctaagtccttcactagttcgcggaaatcgatccgaccatccgcagtaaaatagaaaataatcttattacgatcgaatgtatactctacatctacaagtttcatatcaagattatgctctactaccttttgttgacagacttgatatgcttctttggcagcatgtttgttctcttcaacaatggtacgatcattttcatttgcaatacgaataaccttttttagcggtaatacaacgtcgttttcatcaacttgttttttggtaataactacttttccgtattcaatacctcttaccgtttctacaatgacaaactcattttcagagatatcgaactggtttggatcaaagtaatatacctttccggccttcttaaagcgaacacctactacatcatacaaaacggtcatccctcctgcaaccgcaacactaactgttcgaacacaagctgcgcatttacattagcgttgattctattttttgcctctaatatattaaagagagctgatacaatgcgcttctgagcataggaaaacgattcaaacatctctttctgatcatgaaaaacaagacgatcttcttctccaagttgaacatataataaatccttataaataaggagtaacatatctaaaccttgctgtaattgttctttctctccaaagtgttttccccatttttcttgtacaaaaaaaatagaggttttatctttttcgagcgcttcacataattttatcactaaagctcgtgcttgtgcaaaccattcatcactacataaagctaaagcttcatcaaaactatttgtaagttgagcagcaagtgtcgataaagatgctgtaatcccttcatcctgtaatcttctaattaaagattccgtaggtaacggtctaaacgtaacaacttggcaacgagataaaatcgtatttaaaatttgatgactttgttcagtaagtaaaatagcagttgtatcactacttggttcttctaaaaatttcaaaagtgtatttgccgcatttgctgtcatacgatctgcgtgctcaataatatataattttttatttgcctctaatcctgtttttgaaaactcttcttgtaaatcatgaatttgctgctttttaatagataatccgtctggttttacaatatgtaagttagggtggttacctgaatcaattcgcttacagtttgtacatacatggcagggctctaccccattccgctcagaacagaggaaactctttgccatttgaattgctgtcgcaaactttcctgtccctttccctccctctaacaagtaagcgtgggatatacgctcttttgcaatgctattcatcaacatttttacaccgatgggttgtatagcagaaagctgctcccacgtcttcgtcataatgcatacctcacttatttcattctttccttctattataacaatttatcttctataatctgaacaacttcttctataagtttttccatcggctgatcagcatttaccaatacaatacgatccgagaaacgttctacaacttgtaaatacccttcgcgcacacgtttatggaaagagatatcttccatatctagtcgatttacttcacgtcctgcatctttttcaatccgagccaaaccaacctcaggctcaatgtctagataaattgttaaactaggcatacagtcctctgttgcgaaacgatttatttcaaataccttatccatacccaatcctcttgcatagccttggtatgctaaagagctatctataaaacgatcacataacacgaggtagttctcattaagtgctggcataactttttctactaaatgttgtctgcgcgcagcagcataaagaagcgcttctgtacgtgcttccatcatcgtatattcttgtttatgtaaaatcgtcctaatgtcctcagaaattgcaataccgcctggttcccttgtcgccattaccttttgtgcttttttttcaaaatatggcaataagcttttaattaacgttgttttacctgaaccttctgggccctcaattgttacaaataatcccttcatcctaaaacctactttctatatcatacactttcatatatttcgtattaccttgaaaacgagctcctgctctctctaaatacataatttgctctttatgctctgaagtaattctctctccatacataatcaatggaattccaggtggatacggaatcaccatttccgccgctatcattccaacagcctcttctatagatactatctttgtttcatatccgtctagttgtttatacgtatacggtaaaagagagaattcacctttataagtataacgaatagattccctcttgtctttcacctcataatgttgcaatgctactcggatcatctctataaccttcatatatccctcatttacttgtaagggtaaaataaataggacattgtacggatcagccatctctgtatatataccgaccttttcaaatacagactgtaattcgtaccctgataactgacaacgagtttgtacggtgacctttaactcatcttgcaacggatattctaaaatggcgatttggggaatagaacgtaattgttccttaaatcttcgtaaaaactcaacaatttcactgtgaccttcttcttttatacgcgccattgtaaagcgtgctatatccaaggaagccataattggatacgatggactactagattgtagcatacttaaataagtagtaaccttctcttcgtctactaagtgactatttatatgtaaataggaacccattgtcattgcgggtaatgttttatgtgcagaatgaactacaatatctgcaccatatgttaatgctgactttgggaatggttctcccaagcacagatgtgccccatgtgcctcatctaccaaaacagggattttatgtgcatgtgcaaaagcgatgcttgcctctagatccatacccataccataataattaggatgcgttaaaatgagtgctttcgcatttggatacttttcaattgctttcttaataatttcgttacgaactcccaccggtacgttataagcttcatcaatccatggatctaaaaaaatgggatttgctcccgcaagttttaaagcattaataattgatttatggcaatttctttgtacaagaacaatatcatgttccccacaacaagacaaaatcattgctaagttcccgactgttgaaccattaattaaaaaatagctcctctttgtattataaacttcagccaataattgttgtgcctcatctatacattcaaacggactatgcaaatcatctagtcctgctaactcagttacatcaatagatagaatatctttaaactctcttattgcctcctgagggaagtttaaaccattcttatgacctggaacatgaaaggataacggccctctttctttaaactctattaacgcctcatataaaggcatacgattttgattcatctacatctcttccttattattcattctctatctattatacagaacaaaaaaaataataggcatatgcctatttaaaaatatgatacttctaattttcgaagctgctttaaataatgtatatatttcggatcatctgtctctgtattcaccatatccttttcacattcatagcatattaaattattataaacatatataccttcttttctttttgtctcacaaacaatacaaacttcactttgtaatttcatagccttccctccctattttagtgaacctattttatacttctaatccttaacaatttacagaaaaatatacacccatctcttatataatatgattaactcttgggcaacgtgtttgtatcacccttacttctttcccgttctttttaacaatacaaaaaaacacaaatcaaatgacttgtgtttttagttgcttggcgacgtcctactctcacagggacaaggtcccaactaccatcggcgctagagagcttaacttccgtgttcggtatgggaacgggtgtgacctctctgccatcatcaccaaactatgaaggcatattccttcaaaactagataacattgctacatattatatggttaagtcctcgatctattagtattcgtcagctccacatgtcactattttgtatgaaagagacattttgtttaatggtagttgcatctttttctacagtagcaacacgcttatcaaatccggcttggttatcctgcaccttagttacagtagattttacaccatccacactttgctctaattcatatgttgacttgctgaagtctgttggaacagaacccttttctagtttagctttcttgaaacgaaaccttttccctttagatgcttcatttctagcaaaacgaattctaaatccccaaccagtagcacgaacatcgattttaaacgtccatgactcacgacgccagtctttagctggcacaggcttttgtactgactcactccacgatccgttgatgtattggaataaaataaaatctaaaagcacatcattttgaatgtctaaagatattgttatatctttccctttttcaaagtctcctatcttagtattatctagatggaattgataaaaggcgtctgtatgatcttgacattcaatcgctacgtattcgccaggctgaacaaatgatgtaactttattcaacaccgcgccaccaatcatcccgattgtttgaggtctttcgtttgggcctgtattgattagccagttttcaacgcctacagtacgagcctcaacctgttctaactttgtcgagattttcccagcttctgctttaatttcagttgtaactttgataaattcgttactgtctgcctggtcttcaggtgcaggtctccacggataaacttttttagttaacgatagcataggtgaagtttgttggtataaagcgcctttaggtattgattcagcttcgaatctatatacaacatttggatcagcggcatcagatccgactggaattgttaccgaaactcttttccattctccattaactgttgttttaccagcactgttaggaaagaatacttgtgtagattccccacctatcattctagctgttacagaaaatgttacagtatcaccaatttttattttccctcgcttgattaattcactgggtttaacggctataccttgccattctgtatcagtttgcgcgatagcattcccattgtacgtgtccttaataacagataggcgagcaccttttaaagataattcttcgttagttgttaacgtcttagttcctcttacaaggttgataacatcatcatcaaggttatttacattcttttcgattcgttcgatggtttgctttgttccatttgcatcttcttcaactttatttaacttttgaattgtttgtgatgacgttttgttgatttgttcaatggaactggaaataccgttaatgttttgttctgtttttactacacgatctgtaataccgttttgatcttttttaatatcggatacagtactttgtagcccttcaacgccttttgtagtctcaacgattgttttgttcatatcttcttgagtaccttgtatacgtgtgattgtttctttagttgcctcgtcactttcttcaagcgccttagttacctgactgactctttcttgttctcctttaacagcattgaagtctttttgtagattgtctgctttcgtttcagcttctttaactctagcatctagcttttccgcactagcattaatatcttttgtcacctgttccaacgtttctttcttaactgaatcaacatcaggtacgaccgattcccaagctgcgcctgtccatattttcaaaataccaggctttccattgctaatatcacgccaaagtgtcttataaggtctaagccctgttgtcggtggattctttgcttcaatgatgtctaccgtgttatttttaagattctcttgtactttttcagccaatgttttcgctgcttcggattctttcttagcatcactagctgtttcatttgcatctttcactaatttatctaactgatccagtatttcttgtttctcaccgaatttactaaggattcgattgtaaatcttttttaattcctcgttcggatcagtaagttcacgataatcaccaaacacatatttatcctgtgtaggatccgtaaaagattcatcaccagcaattacacgtgcttctaggtataacttaggagtgaagcctgtatctttgattcggattgtatcaccctcgttaattagttcatgtgctagtccgaaaatacgtccaatcgattgtgcttctactacataagaaacggaagtattgactcgtttccttaattctgttttcatgagagtcataagccgctctggtgtcatattttgatcttctgtttctggagtgtagaaaccaaatttatgtttaccatgcgcattccatcgctgaaatgcgtcattatcgacgatgtaaggtagtcctttatttatgctctccaccgtgataagtttgtcaccttcacctcgtacaaatccgacaagtgctgtgcaaatatctctagaatgttcaattcttctaacctcaactaaatcttttcctagagttacttccttgccagtttctcgccctcgcttctttatcatatctacgtaccagccggtaatcttggaacccattacttcgacgcgatattggatttctaactcaaacaaagaagcaattttctttaaaaaagtgagaggatcaataaattcgtcgatagtcatagtgtggaatgaagaataatccgttattccacgttgccattttgaatcggcaagagcgatatcaataaacgtattaactgtttcgctctctatacgttgaggtttaataatcccatctttcgctatttgaacccaagcaccagacgagtgtacagttaaagatctatcatttgaatctttttctacttcattgttaataacatacggaacaatgcgaccatctcgtacttcctttaaaaccaagttctgctgttgtaatgtaattgcatgtggagtgccgtcaaaagttgtaaaatcaaatatatcaatgttatttttgatttcccaatgacggttatcagcccagtaatcttttggttgaatagctgatataatttgatctgttttaaaatcaacaacatgaagtaatccacttggtgttctcatctaaaacgctccctatatgtaacctttgctgttccaatatcagatggcataatttcgattatattagcacctttattaataacaggaaaattactgaaaaactcttttatgttaatcgcgtttttcccttcaatactgacgtgagtgttctctgtatcgatcactactttatcaccaacatcgaatatataaggtggtgtattttgattatttaaatttactttccaaaatttcaaatcagaaactgtcatcgcttctactggtggtacatcttgccactgcatgatactaatctggatttgagctgctttttccatatgcttattgtctttatcagtccatctcgcaaagcgttctgaaccatctttttctgttccaggaagaaattttgaaatataagcctcccatacatttccggtcctagcaatccacaacctaccataatactgattccatgtatttggataatcaccactctcataaattaaacctgtttttcctggtttgttatcgtatccaataaccatcgttccaaaattttgttcggcttgccaatagagatcgttcatggcaatttttgaaagaactttactgttttcatcgagtatcgctatctcaactcgtcccatttcattgattttcttgctcttacaagtaacgtaagcttgcatgataaaatcttctactgggccaccagggatactttttttaacagctgcaccgtgccatccttttcccgttccaaaatcagaacaataaaattgatatttatctgatttcatttcaccaaccggttccccatcttccattgagctgactttactccatccgaccgtagtggccatttcatcccatataagcctttgattcctttctacaggcttttccacagtttttagcggcatcccaatacgaaaataatctcgatcacttaaagataccccaccaaaccatacatctaaaaaagtgttcggtttcgtaatttcaatctcaattataggattagaatgaacagtacctttattttgaacatttgctattaacccacgtccatccatttcaaattctaccgttttagtaggtcctaacttatatggcatttcacaaacaaaagtaaggactccttctcctaaattcactaattgctgtgggtcaaacgattcatcaataagggccaaatacgtgcgatctttttcatcatcaaagatcagttcttgaggttgatctgtaataagccaattagctatttcttcctttaacttttcagcctcttccatagattcataaaataatgcaaccggtataattatttttctcatttttgtttgtgttcttatcaaacgcccacctggatagtgagggacttcaaggaatgtacgttccaaaggagcccatgcagggcgttttttaccctgcaatgggattacatttgaatttcttttcccgttaaaactaaagaaactgattccagtcatatcatcacctacctaaaatactttcaatctttctttctcgctttcttgaaacttactaacatctgagtagatttcctttgctatttctctgccgtttaaattaacttgcaaaatagttggaccttgtgatgcatattgttgtgctccagcttgttgagttaatggtagagaccccattattccgttagcaatcgcgtcgaatgtttgtttgcgaagcggtaaaactgtttcatcatatcctcttgcatcaccaacaccaatcaatgtcggattacccggtttaattaaagcgccattcgctgcccatttgacgtcgaaagatggcaaaccttcatcagcccaacgcgctgggtttaatgatccgtttatattaatcttcggaacaggaatatgaacaccactaaacatgttcttaacgcctgttttgattttatcaatccactccataacaccttcccaagcatttttaaatggggttgcgattgcatctttcacttttccgaatacttcttttatcactgtaagggtgtctcctgagcttttaaaaataccctcgaacatgtcagagaataccttctttacaccatcccaagcttctccaaacagccctttcattttgctgcctattttgccaatgatgccaagtacctttccaacaccccatatttgaatgaaattccaaatgaattcccatgctcctgataaaatctgtttaatggcatcccatacgccggtccaatcaccagtcagcaaggaagaaaatagtttaattgtccctaagatgatatctaaggccccatttataacgccttttatgtttccccatacatcttcaataatgaatagaacaacaggcattacaaattcaataatgccttttataagatcaaatgcattttttacagcttggacaatctgatccccgttttctttccaaaacgccgcaatctttgctataatcccgttcacaaatgacatcacatctgttaataaaggcattaagtaaggagctattgtattgaatacacctttaataaaatcccaagtagccccgattattcccataattacaggagcagcagctgagattagagattgtacattttctataaaactacttaattgggcatgtacatcctgaacgaacatgataatatccactttttgttctggagaaaaccctaacttatccaataaattactagcagctccccaatcaccagatacgagagctttcatagtttctacaccatattgcactgccgctgtagtttcttgtataaactgaattgcattagctgaaaaccctagtttagtaaggatgtcataaccttcaactagcgcattcctatccccagttgcagcaatccagaattgctcgatagcagcgccaacttgttggatgattccaattgcatcacgaagtggttcgaatactttattcatcgcttcttgacgttggcgagtttgctcaataccctgttgaagtttctggtattcaacttcagattggtcgaggattttattggcttcttcttgagtcatggtcccttcctcgaccttcatttttaactcttcttttttctgagctaacataccatcggcattcatcatatcttcagcgtgcttcttagataaagcaagtttttcattatactcttcttgcgttatcttcccttttttgagattcatatcaagaatggctttagattgagctaactgctgatcagtttgttgcattagcttagctgcttcaacagctctaccagatggatcaagccagtcagtaagagatttaacagcactatttgttccgtttgtcattgcaacaagtgctggttcaacatgcgagaaaacaacaagtcctaaattttctaattgtgatttaacgccatcaactgcacctgataagttatttgccattgtttcagccataacctttgcagagccttcagcagtttcgagggtatttaccatatcatcaaaggcaggtttaccacctttaataacttgaatccatcctgcatacgcttcttcaccgaagattgcttttgcagcagcgatttgttgagcgtcagttaacttcccgaacccatcgtgtaattgaccgataatttcattcattggttttaaattaccttgtgaatcctttacagttacatttaatgctgataatgatttagctgcttctttcggcggggcagctaaacgagataatccggcacgtaatgcagtaccagccatagaagctttgataccgttatttgcaaatatttgagcaattgctgccgtttgttcgatgtttaaaccgaatgtagcagctacaggagctgcgtatttcatggtctcgccgagttgttcaacatttaagttggcagtcgcttgggctaacgcgaatacatcggccgctcttcctgcttcagaagccttcattccgaatggtgtcattgtatctgttacgatatcagaagcctttgcaaggtctaatgcaccagcagttgctaaatcaagtagtggtttactagctgcaatcatttggttagaatcccaacctgcgagagccatatattcataggcctcggctacgttggtagcagaccatctggtatcagcaccaagtttacgagcgttagccccaagctcagccatttgtagtccgttcgaacgcgaaagagcttctacctttgacatttgttttgtgtactcagaaccaacatgaactacaccagcaactgcggcaccgacaccgacagcgatgccgactaatccgcccatagctatagcagctccaccaacagaagaacctaaaccagctgccgcagcaccaacttgaccaaatccacgacctaagatacctgtggtcctttgcccgcttctttctgcattagccaatcctctttgtaactgatcatcctttaagaaaattgacccaaacatcttaaataattccatttattcacccgcctttccgcggatttttgcaacacgagcaaacacttcttcttttgtgagtttctgtttcggtgtttgttcgattgaatcgttgtattgttttacctgttcttgcgttggattttcgcgcttatgtttaaattgagggaatgtttcattacagtacggttgtaaggcgcaccattcttcccataacatgcggtccatctcttttttctttgcggtgagatacaaattaataactatttctgcatccaaactctttatgtactccatatttggatagcgagaagctaacgtatcgatgaagtctatttcatcaagttcaccgcattggaaaaaagcttaaccaatccaacttctgaatctttaattgcagtaaacaacttaactaactcttctaaatttaaagttcgtattgtttcccaatctggagatgtttttttatcattttcatcttcatgaactaaaagtccagctacaaattcaaagaattcttgttccgcttcttctaatccgaaaataaacttcatgataatgtcgtacccaaaagtctcttgtgcagctaatacatcagcttgtgttgcgccttctttatttcgtacgcccgtcattaaatctttaagtaagttaatatcaaccttaaatttcgatttcttcaaaatacgaactacagaaaataaatctccgccatgaatttgtctcactttgtattctttttcttgaattgcaatagtcacatttattcctccttaaaataaaaagagcagggattttccctactctttaacctgctggtattaattcagctgcttctgttgctgttaaaatacgttttttccatggtacttttcgaatgttttctggatcacgatgtcctgtgaatgtcacttctggaacaacttcactttcgttttcaaatcctagctctaatgaaccgtcagataatgcgttatatacgataatttcaacgatatctccacctaaagtttcgccaacccatgctacgtttttaagatagctatcttttgttagacgttctgtagcttcaatcacgtcgtacttaattgttttcccgtcttttgtaacagtctcttctgatacttttaaacccgcaataaaatttttgattttttctttatccaaaaattcaagtgtcttaaaactaatttgagtttttgattttgtaatacgtttcatccccatagtgtcacctggagaaccatcatattcaatctctttaaactctggttcgtatttaaatgagccaccgccttgtgtagcgcctacaggaagttcgtctttttctccataattaaagaaaaatgcaccccaatctccgaataggacattctctggttttggttgtggagctgccatataatcaaccctttctattgtttaaaataagttcgtaaaatgaatcgcacttctttgcgtctaatattcgggtctggatcaggtactttctgacttgaaagataagaaatagcagcaccaaattcagcgctgcttaatctttttctatgaagattgttttctagtttcataatcagttcatctattttactaagatgagcagaagtaccgtaaatatcaattgtaagcatgatattcttccgtccccatggttctttatcatcgttaactgtatacaccagataaggcatttcagccgttgttttcgcgatttcatagtacgtgtctttatgaatctttttcaattcactgtgtaatgtatttataaagtcattcatggtatctacctcattaatgacgaataggttcgtgttgcagcttgcgtaatcatcggtttattattctccgctgcaggtctaaggaatggttgagcatgttgcccttgcgttttaaccattttccccgtttttgggtcacggtacatccatggagttttcctcccgtcaccatcaaccgcatagactcctgtgcccttctcgacgtatatgccatagtcagcggatgtaccaataacaaccttttctagttccgctttagaactaatactgcttcttaaatttccagtatctacagcagctaatagtttggctttagaactaacaaattgaccaacagcagtatgagccgctttctttgcagctaaatgccttgccataacagcagctctatttgattggaatttcatgctcatatggcaacatctccaattctatttgaaaaaatctacctgcattcattggatcaccgggataagtaacgctgtatactttattatcaataactaatctatcttgaatagttacgtcaaatggaaaacagtaaaagaaatgtgtactttcctcttctactttcttattacgtgcatcctttgtcccttgaatggcatctagtacaccttttacagtgtttattactctccattcttctgtaggatatggtccatcatcagaaccatcattacgaagtactgaagcatctttaccaaacttacgaatcatcgattgaatcataagacacgtagcctcactttcagccctttcgtaatactagcaggataatctccaatatcatcataagtaacagagtagttacctaatgattcacttttcttcccttctctctcctgttccttatactgatgaatcaccattttggaaataataccaggataagcaggaggaaactcaggtatttttctattcgtatactcagcaaccacaagcattgtatcttcaatatccactaatagattttcaggtttttcattaggcagctttatttgtacacgctttaaaatttctattttcatatccatctaatcacctacttgtgtaaatgaaaaagatgaaaggcttattaagcccctcatcctgctggtggtgcagttggtgtagttggtacgattgtagccgtaagcactgctagtgattcttgacgaagaatatctccaccataaaccataaggccacgaataccatcagcaaatgcaccttgtagacgcattgcttctgtttcatctaattgtttaccatacccaatagcggatttatgaagtccaagaattttatatttaccaccagatccatgaacttcttcagacacaacgatttgtgaaccgttgataatttgaccttcaacaataccattttctaacacgacaggttgtttagtaaaacggtcatccttagataacaatccaagaacttgagagttaataattgtgaagcgttcagttttaggtacttttttaatgtttaaaattgtatttaagtcaacgatatagtcgtaagcgttttttggtgttaattcaattggagatttatcgctaccgattaagtgttccttaagagcttctgcatacttacctaaaataaaggtatcaactgtttcctgaagtaccgcgccagcttcttgtgtatgcggatcgattaaattacctgctgcttgtactgcatctacatcatctactttgaacgcaaagtactttttctgatccatattaagttctactttagaaggattcgtgtcatcccattctacttttccttcataatcttttacatttactgccccgacgcggttgaagataattttgttaccttcgatttttgttggttttgttgtgattaaatcagcgatagaacgcttgtggaagttcgccattaaacgcgcttcccaaattgttggaataaaagttgctactgacatatattaattcctcctcattatttccatgttttcatatctttttggatttgatcccagttttcgttaatttcagactggttcattgttgctacttgttgacgagtaaacacagcgccactaccagaaccggcatagacttcgcgccctgctgctttaaacttctctgctactttagcttctaatgaagtattgaataactcattaagcttcgccacacgactttttgtgtcatctgcatcagcaccgataacaaagtccacaaatttgaggtctaatcctacttctgataacgcctcagttgcagcccactgcatttctttttggtgtaataccttttctcgttcatcattttgctcttggagttgtttcatttcgtattccgctttttcttgagcggtcatagaagcagtacggaagctttctaactcttttttagtagcgttcaattctttcgtatacttggtacgcactttgtcttctgctgattgaaccattttctcgataaacgcttttgtcgcttcatctaactgtggttcttttgtgtcatcaacaggtggtgtttggtcatctggtggcgtatcatctgcaggtggtgttggatcagaaaagaattgcagatttgataaacgtaatggtaatttcgttacttccttttctttaaaaaactgtaactgcttatgtttttgtaaaatattcatcatttttcctcctttgagttcctatgaatacgccctattaagttcataatctataagccctcaagtgtttttatttgtattattcaacaatcatccaatcttcagctaaaatatcagatacacttggaacccacatcgcatgagtgccatcagcacaacgtaattgcaagtaaggtcgtaccttaaataaatcaccttcatttaatccccaagcttctgccgtttgtttattacaaggaattccatcaggatatcctttttgataaacagcaaacatattcttaccgttccaacctttacgtgacaacttattgccacttttcattaattcgagtgcttttccaaaattcattattctagaccgtccttccattcttcataactaactgctgtaataacttcattcctacctgttgtcgggtttctagcccttctctcaataaatggactaacatccgctacttccgtaatgaaagtacagcggcagcgtacaacctctttagcaggtaaattactatcgtgtggatattcacaactataaccaccaactttaaataatcctttaaacggtactttttgatggtctgctgcttggtgagtaggacgtgtacgtttatctaatgtagaaatccaaatcttctccattgatacaccttcgtcaaaagcttgcgaggcactgtcataagtacctaagttttgtactctagcactttctgtccatgcaaccatttgtgctttcttcgcatccccatcaagaataggcttaatacgattagccattaccgcatacccttcaccttttctaaggccgatggatagttctttacgtattcggctaattatctgtgctcgatgagtacttaacctttgattgagtgtcattttatcgataggcatttgtaccgctcgcttaatgacgttcgggtcaatcagcccatatgaaagggatacaccaacctctttttcgataagataactcgtataataaaaagactccccatattgagtggagagtgtttcattgagagttttctttttctcataagttatttcattaataacttgctgtagttcactttgcaggttcttgtatcgattaaatcgacgcatttcctgcatacttaactgctcatttatcgcatatttagcataataaaaagccagtattcctctgacttcttccaaagcatctttatacaggtagagaatcgccttttccagctcgtcctctatcttttggaggtgtttctgcttcttgtcccattccatcgttttcaccgcctttatgtacagtgtctaaatcgatagaatcaacctcttcttccttcatcttttgtaattctgcctttggatcaggaataacagataacatagataatcgtgtttcttcgcttattaaaccctgtaatttagactgaacatcagcttcatcagataagtttgctggaaggttacgtgtaaattggaacgtcatgcaaaggtaatctaattcttctttatttgagcgtaaattccaagcgtcgaatagtaacttaaattgttgtcgcaatgacttagtgaatttcatttctaatgtaccggattttgtttctaacgatagcaacttataacgaatagcaacaccagtaaggttaccaccaaacgattcatcagaaaggttcacatgcttcgtgaatcggcatatattcttttctaacctgtctagatgatgttctaaaatgttgtcattaaggtccttagttaaaaaattagcctcgccattctcgcctacatccagagctccagtttgttttaatttctcaatggtatcatcatctatatccacacctttgaaaatcatataagccaaacggaactgctcaatctcactatttacatcagagatagccctatcatatccctcaataagagaaatagctttatcgacatccccctgcaattcttcattgttaggaaatccgataagtggtacacctttgtataaattagtaattcgatttgtttctttcaacttatctaaatcttcaccagtgtactcaatgatttgcgtatcattgtaaaattccactttgtatccgtctttgaaatcatcaccatcgattactttgattggatagcagcggatagcgtatttaggctctgcaatgcttgaattagtaagaaatattgcttcataaggtttgatattcataaccttttcaattccttctttgtcatggtaaagcagtctcgctccataaccgcaaatagaagcaaactttcctgtttccgcgtcagcatcttcggtatgattcgattttaaaaagtcttggatacgcttcaatacttcctcgtcttcatgatctagactgtatgaaataggcaatccgaacatatatcctatttttgtatcaataatttcagaaaagaaatcattgtttagcttgttgttaaccttgtccttattcccatcacctttaaactcacgtgtgaatataggtacgcctttctcacttgctttgtaacgctcatacctatttatcatgcgttgttttagtggttcaaactcatcaataatctttttgagtagcttaggtgtgggttcaccattttcttcatccagtaacggaatgtagtgttcaaacatcgtctcacctccttaatagattgacttaacagctttcgctttgttattagttaccacgactgtatttacaaaataacgatcaccatccatctggtggtcattttctttattcggtttatcttcaccacgagctgtagctttttcatcccaagtataagaagcgtattcacgaaatgtttctttacagcagtcgttgtattttattttctcttcattcagtagtctcgctacattacgtataccatctataacttcattcttagctttaataactttgaaacgattcttctttaataaagcgataaatgaagccgctgaagggtcaactataatcccacgaatagaaatttctccgacaaattcttttagatcatccagatactcatcatcagttttttgttgcgagttcttacgaccgtcataatgatattcttttgttttgtaccatataccatcacataagccccataatccatatgtcatagggttttgtgtaccatagtcacaagatacataatacttctcgtattctctttcttttgtttttacaacatgtttttctttattaaacatgtcatatacaatgccttctgcaagcacccacagtcctaaaatgaatcgttggaagaaaactccgctatacatgcgatagtatctttgcttcactttttcagataaagaaagattatcgtccattgtaaaatgaatatgtagcaggttcttgtcttccttattatctatccattcgagtttgaaccaatgatacggaccggcagggttacagttaaaccaatactttgagccttcgatagaacatcgtcctgttgcctggtttacaaagctctgtggcataagagcaacttcatcaaaaaacataccagctaatgtaataccttggataagttcttgtgatgattcgtccttaccaccgaatatatagaaatgatttgtgtggccatctttgctaatagtaagcatattatctgatagatggtccttcactttatatttacgcgatttcaacattttctttaatggagtaattacgttacgtcgcagggatccaattgttttacctgccatacctaaattctctccattaaatgtttctgttccccacataacataagaaagagccatcgatacagttttgccagcacgaatagaaccatcgcatataatgccgtcatgctccttcacaggtgaatcttttctccaccaagtaagtacttgtaattgtttcttagagaatggtctgaatttaaaaggagcaggtttaagtttcatcttcccacacctctgctgttttaccttctaatgcatcgataaatccatcatcttcatactcttcaccttcatcacctttaatgcgagaagtatctgctttaattttatcaatttgagctttttgcacttccatctgtattttgtggcgttcttcttcgattttccgtttgaaattgtcaggtaccaaatcaaagtactgtgatagtttgtccagtgctttcatcttgtcagcaagttttactgacacaccatcttttccaagctttacttcggttattatagaaccatcaaccatatcagcctcatgcaagtctacataattgataatacgagttatttcattacccgcttcatccttcatagggccgaacatccccattacaggaacttccttctgcccaaaggtcacatagttagtaatgtcagcaaaagcaatcttaatgtactcttttagtacatccatcgcttctacaaatacattctcgactaactcacctttaagttcttttatataagaggcaacgcgttcacgtcttaataatcggctagcttgtacatgagcaccatctttggagtaaccagcctttaacgcagcttgtgtaccattgaagtatttcacataatacaaacaaaagagccgttccttttcggtcagctcttcatcctctaaaatctcttttaatttttctttcgttttgggatttttaacattggtaacgctcctttttgcaatagtaacgttaccattcatttgctcatcccatttatcttgtgatttccactttctgatttgcgaaggtttgagatttaactctgctgcaatatcaactaatggcttctcacctttacttgctttatatatttcgaatgctttatctctatctgggctacgttgtctagccataaccaccacctcgcggtaatccctaatttattttacgaaagattcaaattactcttttataaatatgtccaagttgctataatagagttaacattgtcatctggaaaagtaattcgtccccaatacgagttacttttcctttttttatggctacttttctaagaattcatccaacgttttaccaagcaaactaatcatcgcttctctcttttgctttggtgttgtattatcttgcatttcattaaagataggaagtacactttctaatttctttttatcgatgcgttcatttacaacgtcctgtcctaacattgaaataaatgtaccaattacaacagcttgttcttgtttatctagtttcatttatctcactccctttaattacgccacatttgattgaatcagctgtatgttcgacaatagattccgctacaactcttccatctaatgaaactccaactttacaatccataggaatagatttactatcgttactcttcttaattatttcagattgtttatttattaattgaacatgagttatatccgctttcgttgctaattcctcttcgaacatagttacttttcttgttaatccttcaatcgttcgttgtaatccagtaacttgtattcttaattcaacaatttcagttttcatttggtagttttgattatccatccttcatcctcctccaaaataaaaaatagcacttattccagcgctaacatttctttctcgtgcatttcttctaataatagccacagcataaagtaaccttgtgcaccagcgacttttctaatgaattgatattgttcttccggtttactaactaatgatctagaaaccttataaatattttcttttactgtcttccaatcaatcgcacctaattccttatgcatatctgtacaccatattctcgataagataaaacgcatacctagaacagcattagaagcattgattttagaattgttagcattcacatgtcttttgacatcatcggagatttcatcaaaatcaagtttgaatgtttcgcatataggactaagatacttaaaacttatttcattaatatcctgttccattaccatcactccctccaaaataaaaagcagtatttaatcgtttacatcagaaacaaattcttgcgatacatcttctgcttcacaatagacatctaggtcggtccaataattttcatcataacgatattcttgtaagtgatctgtaggccatcctatttttttatgcctagcaagaacttcatcataatctttatttctagcgtcttctctaaatcttctggaagctagctcttctgctctctcgtggttttccgcaatgacatacacatgtatttggctatatcctgtatatccattcgtcacataataaagattcattttctttcttttcttcatatatcgcttctttttcataaaaaccactccaaaaagaatcttattttgaaaaatccataacgaaaactaatttatgcagggaaatgaatagacctaacagttttagtttacataatagttattatatgacagtcattaacatgggaaatacgcatggttgagcgattcttgttttataccgttatacagtttttatacatcgttgatttaacagcattcttattaatcgttaaccctaatttcttgcataaacttcactatgttaactatctgtattttaatttaaaattacccagtcatttgctaacatatccgtttgggatgcgagccagccaacaacaattgtattttgtgcagtcttcattgcaatggtatcaacaaatgaaggttctacccctacatactcgccgtatccatatcctaatcccttagacaatttattaccttcaataagatacaaaaacatatttttaccgttccatccttcacgagctacgtttttcccttgcactagtgccactatcgcttgtccaaaactcattattcaacaacctcccaatcttctgctaacatatcagcttggtacgcttgagcgggtacaaccccaccattatcctttaatacagcgaatatcatatcgtgagtttgaaattcccttacatatccagcgttcagttcttcttttacctctggattcttggagagaaaccaatatccaccccaaatagacctttttacttttttaccttgtttcaacgcttctagagcttgaccgaaattcattattatttcctcctctatttccgttcattgtgtccatttgttttctaaaatgcaacacgtttgcgcttatctttccttaacaacaaacaagacgcccccagatcacggaagcgcctacgataattgctattggtttaattaaaactgtcgcactctaatactctcattttcttgaattttagaaacggattcggcaatcgtccccccatttaaggtgacaggaacactcatcattccagcactcactattcctccccgcgctaaacctgaaaatttattagtcaatttctccaatctctctaatgcagcaacacattcattggcagcttcagttacttccttcatttgttttaacgcttctgtcgtatcgacatcaatgttaatctttaatttgttattagccatctacaattccctccgcagctttctttaacttctctatcttttcttgcgcatctttaggaagaacgctcattttagtgcttaattccttttttaaatgatcaatcgtgttgactacaccttcaattctcatacataagtcgttaattactttttgttgatctcgatttacactatctaaatcattaactaatttttctaatcgatcgattctttccgcaagatattgattatccatccttcatcctcctttttaagtgtctaatttgtctactatagctgtatacattcgttatccatctaacatagttaaacgatctttaatgtgtaatttttatataacaaagaaaagcacccattatggatgctatagttcactctttaaataaggaatactaatgattttattgttgcttaatggtatggtgactgttcttaattccttaacagctgctccatcacttaaagtgctatttcttaattgtttctctaacaattcgttgttcgctataattgttatttctacattttctttattactcatatcctcatcctttctttaaaaaagaaaccgccactattaaaatgacggttcttttacggcttataaaaatattaaaggggatgggagaaattcacgttcgaacataaggggatatgtctatgtgaatcgaatgccaagatcactcttaacattctctcagccactgcattcccgtattcttagctacgcactttacgttcagtgactgagagaagactaagaatagtcctccctctgaataggtatagtcaatacttcggctgtcgcatagccttcgttgaccgatatcgaattataaaggattcatatcaagacgtttgtatttcttccgacgtctttttaaataggtggtgtacttgttttaatttttactacatgagaatcaacccctttattaaatgatttgcagcaatgagactcgcaatatcccatcgcttattgtgtattgaaaaaaacatccctatagaatctatatacgagcaaacacttggtcacccaaaacagataccatcggaacaggtctcggtaacctttcatatatagggggcatttgtaccacaaatttcgacatttttcgcaactaaaatcaaaacatgcagaagagactttcatttattctttttccaatcttcttatctgctctttctaaatggttttgaatagtagtttttttcacccctaaataattagatattttttccatcgttaaaccatgacctctagacattacatatatttccttttctctatccgttaaagttgataatgcatcttctaactgcatacggtcccattcagagataacactttcttttgctgctgtatcccattcatatactggcattacagtactacgcacatatctttgcattaataatgggtcacatggtttctcacgttcatatgccgccctacgttcaattcctctttttttccctggctgtttagcagtacgcatccattctagagcgtaattaatatcactgatcattccattgataatacttatatccttttctgttgcgcctaccttagaattttctaattcttttcttgtttctatatactgctgcattaattttttcatcagccaggttcctccttttatataaaaagaggacgctgaattgtatacaggaaaaattgctttcctacacacaaacgccctctgaatgcggactattactttcattgtttttttatttatcattttaatacggtaagtgaaattttaatttaatcctcttttttttagctgctccgatacatttttaccatctgcaataccaaagtatctagcaatagctgtatacgtcattccgtcttctctcatagctgcagctttcacacaaattctatcccattcttctttcgttttcctttttcgcttttgcacttcttctttgccacctagaaatgcgcctagttttattatttctttccctatggtgcaatttgaactacaatgatccaattgctgatatctatactcacaatttttacaatacttatcctgcatatttagaactttgatacgcgcctctttagcattcatatcttcaccctctattactttaactaatacttggccattctaacttatcaacataatataggtaatctactaacgcacgattagttggtgttactaaatatgctctctcatcaaatacttctctttttattgattttggaccaccattttctgctgctttcatatactctttaattagcgcaaatggaactaagaatatagaatgttctttactaaactccaataaaatgaaacaaattgctcccatctgctcagcttgtagtaaccatttgtattggtgaggctttatattacttaaatcaaagcgtttttcttttatagtagccttggcctcaaatgcaataaatcgacctttatatatcccatcataatccactgtagattttttctcgtaatatccttctttaattcttccatccctatattttttcgtaactacaacgggtgtagctcgtttttcaattaatgcaatttcattatttctatacatatcgtttgaccaattaattagattttcaaatgcaggtccatgtgctccgctatatgccatttatatcagtctcactttctattaaaaggattattttattaagttatgtttttttaactgaaaccaagtctccatgcctcttacgtctttctcataaattggcattacatatatctcttcgtttattaacagttggaattctacacattgtttttctctgttccatccgtaagatgccataggaaccattttaggctccgctttttctgtcattttctcttccccccctgaataaaactcaatattccgtcaatactgtagacaacccattaagttactttctcccagttcccccttggagaaccagccgggcagttagcttttgctagctgctcttttagttatttgtatcttcgaatttcgcttttaaacgttcataatctcgtctttcttgttcttcttgtcttttcttatattcttcttgttgtttttgatgcgctaagcgtatttcattctcgtattcttcaatttcttcgtgagagattatccctttttcatgcaatgtttttcttaaccaattatgctttaacacatatgctcttgcgttgtatttaccgtacatactgatttcactgctaccatcatcttggaattgttcaactactaatattcccttatcttttgtaacgatcgtaatagccttagcaaattgtgccatgtgtgtaaaagctatttctttcccaactaaatcctcttctttttccataaagtacatttaacattccccttttctacaaaatgaaatttttgttcaaattacgaataccatctactaaactcaatattgaatacttccaaggccctacccgccaaataaacaggattttcagctccacttgttattcctacaagaacatcacgtaacaatttatcttgttctacatgtgctttttcgctattgcaccattcagcttctgctatgctacggatataatctaatcgttcgtttagttgcttctttgttctaattggttttgccattgattatcctacctttctgataaaatgaagtttttgttaagttttatctttacattccaaagaattttttagctattttgtctgtatttaagttttttgtgcaaaaagtaagataacaaaggatactaaccgcaatatttcctataggtactaacactaaacatataataaaaatatttgggtaaatttcttcctcttccatcactcgtttcataagtttacgacttacaattacactccctacatataggagcaacaacactattgaaaataagatttgattagcaactggcaatataattcctccttttctaataaaatagcgtttttgttgaatttttattgagtttacattgaccttttgttgattttttcttcacatttaaaagaaacaaacatatggatattgtatgtagtctctgcgctcatagagatctacctttcttattaaagagcatgcttatatgtgtgctccttttcgcttattatgaaatatcgtttgggttaaaactccaactcgtatcgtttctttaatgacaggctccataaattcacataaggaatacaatattaaaaatttactcatgaaaatctgattacaacttttgggatttttctgtttcatgagacattcatctaccttattgagagcacatatacaagtgtgctctttttattaataaaactaattcaaataactattttgtattgtctgctttaatcttttgtttagtccactctacaactactcttctagattgaaaccagtgtacattacacgtagaacaaatatatttagtgcaagtttcaacataattaaccgtctctaacttattcccacaatttaaacagtgttgggccaatgtattcatctccttttctctcaaataacgcttttaataaaaattagttgaaacaacaactgtcggctctacagatacttttattaactttctatagtatctttctccattgatttcaatcgatgtttttcttgctcccttatatagcgtgtctaaacgcttaaaatcactttcagaaattaacttccaaacaaacacatcatccatcgattcttcaacatttctagtatcataacgctcccattgccaaaacatttccgatagccaatcatctaagtcagaatgcgttgtaaaaatgtacgcttcatcaccgcagtcgtcttctctgaatacaaaatagtactccgttaatatgctagtgccttttccttctctttgaacgaactctttaaaagcttcccaattacttttcaatccgccccaatctaaacttctcaccattctattcccctccgtttttgtacaaaattcaaattttgtttagtttgttcttgctgttttatattcaaaaaaactggaagactttttatgtttatcgcaagcgtatacatctgtaggaagatgcttcctgccttgtggatctctagcgaatataaaacccttggttgttgcatcatttttacatccaacataattgcatttctccactttcattcccctccaaaatagctatttttttgactgttcaaatgcttgtttctcacaatctatacacgctacaatgtcaccagacttatcgaattgataaatagacttttcttcaatatccttatttaaaaagcaaatatcacaattaaattgctttttcttatctactaattcgtcattgattttcttagttagttttacagttccaatttcttcatacggttcaacagaataccctttctcttgtaacactttcgcaatatcttgcatatccttccaagctgctgtaccttgtccaaatttaataataattgtattcattttttattcccctttaatttttctatttattttttctaataatcctgttattaagcctataatccagcctaataaaaatatgaacgtatatcccactacaccacctacttaataacaaatatttatatataatttacaatctaatccaacaagaattttcttttagtctccgcatacgttcttttgttgataaagcaggtgttgttaacgcttcttctatattccatttcaatttcttaatccgatcgtaaactgtgctatatcttaagccattttcctttgccttttgtatttgttcatccgtcaatacacgattacattcattcgcacgcttcaaagtttcctctcgactcaatggaggtttagttattgaatctattaaactccaacctctttttcttcttcccttaaatgtggttcttcctatattatttttcaaagcaatctctttcactttagaccattctgaagcttttcgaggtgattcagtcattgcaaaatctttatcccaacccaaatttctaatcctatgttctaataatttacgactaaccccatgcttagctgctacttcataatcttctggagtgacataatattcatatgacgatttcataaaacccatcctcctctttactcaatatccacttgcttgacgttcaaagttctccttatttttatctttgtaggcttgtacaatatcttcaaatttgtacccatacaagtaacaaagacggaagaaaataccaaaagccttatgcaaatgtgttagagttacgtttaaatctctatattggcaccacgcacgtttagcggttaaaatatcctgcatataccattcaaatagcatattgacgcttaatatatttttcttcataatgtattgttcgcggaacattgctgctattctacgctttaatgtatggcgatctaattcaattacaatgttcatgagaaaatgaaacccatcaactaattcaaccaacagcccttctttaggagtcccaaaccctacactccacattttaaatgctctcgtttcattccaagcctcgccaatctccactaataatgcacgaaacagcatgtctaatttgtcattacccttataaccaatgcgtctatcaagttctttttgcatttccattaattcactaatatcaaatgtttggcttgtttcttctttagtaatgatatgcaagttagttgtatgtctcattgtgcatacactcctttacgataatctttaataatggcaccattctcattaaaatatgcaatttcccaatacggattaaatctaaacttatgcggatttccatctaaaataacgtacaaatcatttttgcaattcccgacaatcgtcccttgtcttccctgtacttcgacacgcatcccgcgtttagcaaatggtattcttctgtagttacacatttttcgaaatggtgcttcttgtccaaaaagtgtactaatatctactactcccagatacttgcaactaatgaacctttcaaattgttcgaatggcatatctataaagtgctgctttttaaattgtttataatagtggtattttgctttctcttcactttccttaaacacaatatggtcacatctccactgcggaaaaaccgttgaaatatgatacttgtatgtaggagtatccattagtttccctcctgtccaacaaaggagacttttgaccaatccatttctgctattttttcttgattaatcatctccaaaggtacttctagcaaaaagcgcgccgttttgttgcaattcgtgcatttcacatgaatagttttttcttctgcgcttaccatgattccgccaatcccgttatcctccgttgtaataattggcaatacagatgtaactggaccttcattttcaaattccttttcaaccaaactagccagtatattcattccacataagcaagtaatttcaaatttcatattatttatcccctttaattgttttatatttgtaactattagtaagaccgtcaattctagctcgtccaattcccacaattgacggtctctgagcctataacacttcaaatctattaatcgatttattatcctttgtttctccaattgctttgttcacctgctgtttacttttgaatcttatcgaataccctaattgctatagctataataagactgaatattacaaaaacaattaatgtatccttatccataacggattaacctgccatatcttctgcgaaaaagtagatttctagttctttaggatctatttggaacctttcatctgaattattgaccagtactgctacaagtcccgtttcagaatcttgatgttgtacagttaaaacacgtttatcgttactaacgaagtcgccaggatggaattcgttgttttttctacctttagcagcgaatactctgcggcgttcttcccaatactgctcatcttctgttgcttttcggcactgatcagcaaactgccatcccttatctcctacactcataaccgattcgttaccccacgttccatataatgcaataccgccattctgatcgataaaagcaatatcttctactgctgcaaacattgtgtagtctttgccttcaaacgctacccattccccttttgcaataaacggtgcaatgatttccgtcatatttatattcactaaagtcactttcatatttaattcctccttaatttgtactaaacccaaaaattaacgatgtatgctccgttcatttgaatttcttttcttgcataagtcgtttttccatttttaaacttgactggtttatagaacccgtttttactaacatcagatgctctgttagcatgttgatattgatatattttaaattcatttgcatatacaaccggatcatgtcctgctccccaactgtcccaacgaccttcgacaaacttagctggatcatcacaaattgcataaatactatcttcttcattaattacgaggtatatatcatcccaatcttgcattgttttcaatccattcttaatagctctcattgcatctaacgcaccaataaaatcagcttccatagtaattaacatcctttcgttatttaagatatttagttacatattgcggtctaaatccactatctaaatagattcttagctgctgtggctcttgcgattccctagccgcgcagcaaatcctctctgcggaatcccaatgaaaacttttgtcttcacttctcttataacgccatatagctttgacataatccatgaacatgtcaaagtgattatcctgttttgtagagcgaggcagttcgtccgcgctccagacgtcgcatggaataatagccatgacatctacaaagctcgccaatcctcgcctttgttttacatgcgccttctttatatcaaaaggagcactttgtactatatctggttgttttatagaatcattcagtaacagtgtcagttgttccgtcatggtgctcaccttctaactgcatttgcagtgttgcagtgaatccgcgttctaatattgatccgataactgcattcatccataaatgagttccgatcttcctttgtaaaagtgttataatcgttagtatttcttttgtagagagtgagacaaattcacctgatttttcttggttaaattgcccaccacgcttttctatgtttaaagtaatgttattttctttcacatattgttctgccttaattagatcaaactgacgaaccttatcgcgtccatatttggtaattaacgcttttaacatgtctactaaaacattgacatctatcacttttaatttggtttccatctcaccacggcaagatttgcataacgttttttcgcatccctcaatgtgcatatttgttacatcggattctggtattacatcaccgcaaatatcgcaccattcactattgtcaaacaacgcactgaacataaatttcaactcccaacctttaattttttatcgtttatatttaatgcacttattgcatggccgctagtgcgtttatgtgtactaatgtgttataattgcaaatgtaaattctttcttaactacccatctcgcaaatgggtattttttatacactttttttgatttcttctactatcttcgaacttccactaacttcttctagatgcttagcaactttcaaaacttcatttctttctttatttctattttgttgatcactcttctgcttttgcatgtacaggtccataagttccgattcaatcgcaactgcttcactagattgtttgtcgcatagtgtttttaattcttgagcagctgtaaactcaccagaattcattgctctttcacattgagaaagtaataacttacgattcatcatatattctcgaagctttccctctaaaagttcagctctttgtacatgctcaggaagcactctgtctcttattcccaattacattcacttcccgttcttgtttacggtcatcttcatcgagttttcgctcgatgaagctaccgcctttgtatgctgctaatgctagtaatccaagtcctaaaccaaagatacacacggcattggtactctcaactaagacaatgtccattacgcaataataaatacctttttagattcaatttcctctgctaattcagcagttaaatactctttaatgttgtcaattgcttctagtttccatgcgccaccgtccgcttcaaataatgcacattctggacctttacgcattcggaatataaaattactttctggttgttcaacttcaacaaatgttctgtatggctttaataaaaccggattaggtactttcacattccctacagtagcaacgcccatttttgctacgacactttgagaaacaccatcgtcaccaattgtatttacagcctcttccttgacatttccaacaagcttgagcattaaatcacgatctgaattcggtacaaatgcagactgtaaactaatattaaaattctctacatcatggtatctttcaaatgaaaaacgcggtaataatgcttctacttgaataaaattactacgattatagtcattgttaatttgcgtgaagcaagaaacacttgttggactttcaatatgaaccattaatggatgatctccatcaaactgcgatttaatataggcaactaaaccagaaagattatttacagtgattgtttttgctgtcggtttcttaataacatgcataggttgtgttgataacttttgtccattaatctcctcaatacgtgtatttcccaatccaactacatattcaattgctgctttaatcatttttcatttccccttttctttttttagttagttgattgttgacgtaaatctacaactttatcgcctacatcattttttattacttcttcacctggatcataaaaggtttgtccaattactccagaaacaagttcttgtcctactaaattaccttcattgtcataatccataacaattttagattcaacttctgttgcaggaactaacgttgttttagcttgtaccttacaattcagtacatctcgttgctgatcacctgctactgcaatcgtaatattaattttccttacctttttagggtcggtatttgggtctgcaatgttctccaaaaccttctttaattcaatatttactctttcaaataaggccccatctgcaaaactatttaagtcaatcatctttctacctcctaagcggttttactaccgttaaataacgggcgccatccttctataaaactgagagcttccccaaaatccttttgaagtatattaggataagcattcacttggtaagcatcttttaggttcttccataaagcggagtacacttttcttgttgtagcgtacaattccttatctatcttgttttcattccatagattatgtactcgtttatttacagcgtttctaattacttgctgctgtccataatcaagcgtgatacgtttatctatatcacttctcattttctctacatcttttttcagactatcgacttctccatttaactcaatagtcattttcatattggccaggatactttcttttgcgttcatcgctttaggtttgctgcgaatatattcttgcatccttttaaactcttgaataaacttaatcttcatttgaacagcttctcttgtgttgtaactcataacaactaatgtaaaggcttcttctgtcatatcaattttcggataataacgtcctctgctctcataagttcgctccgcaaaattgcttagtgaaaattcgtaacctgcatattccatttgttttctaatatctcttagtacgtcagcgtgatttttacaaaacacctcagcaatcgttaaactatttgttactgcctttccattaacttcaaatactaactcagcatgtactggcgtttcatttactgctgctaattgatccattttactctcctcatcattcgttttttgagacgtctcatttagagacctgaaaggcaaaaaaatatactacttcatcaattcatcgatggttacttcatacagattagctaacaaagacaatctatgtaagttaggttcacgttttcctgtttctacttgagaatatgaattcctatttgtgtaacctattgtttcagctacttcaatctgtgtgaaacctttagaaagtctaagttctctgatcttttcagtgtttaatttcattcggtatcaccctttgttcgtttcgttaaattgagtatatcacaagaggtctctttttgagaaccccaaaattataaaaaataaaagtttttaaaagtgttgtcatttcgagaacatatttgttaaatttaagatataggaaatgtatttatataattatttttagtgttagtaaataaaaattactaataaatattaaggggaatataaagtatggattacaaattaattagtagacgtgtgaaagatataagaactgacatactgcgaattagtcaaagggaatttgctgaagctttagggatacagagtagatcagctgtttcgatgtgggaaaatgaagagagtacaaaatgcccatctaaaaagatgagcttagaaattgcaaaacttgctaatgtatctgtttcttatgtactaggcgaatcagatgagaagaaccctgacgtcgctgcaaaagacgaatgggaaagacttatgatgcaagttaaaacaaaatcacctgagaagcaaaaagaacttttagatcttattactaacttagttaagatatccggcgattgatagctttagttgctaccaaccgctttttttatttctgctagtatatcaaaagatactgaatcccctttctcagcactgttcattacttcttttagtacgtccccgaatttatctactacagttttattctctaatttctccatccctaaatcctccaatgtaatctttatagtttgtgaatcattcacatactttcgaagttagcttttcacaataaacttcgaacgccctctaaaatcaagaaatgcgattaccccttttggataatcgcaactctacattttatattaaattttaccagcctccgccacctggttcggacatcatagcaactttaggctcagacattgtatattctttttgatctatcttgtaattaatattaaaagtaatcatacccacaaaagctaatattgggagaatcattaagtatttcttcaatcaattcacctctttcacataagattattataccattttttgaatattaacccaagtatattttagggagatttgcgtaaaaaaggctctttttttcgataaacattctatgtgagatttcgattaattctcggtcatttcttgctaaacctaagaagagtgtctgaaactcattaagataaccttttgtttctttcattttcagtaaaatagactctgacgcttgatagttacctctcttaaattctaaataagcttgatcatcatcatccaaaatatcaggcaatgtatctaagtctcggtaatgatgaatcttcaagaaaatgattgtgctttttattcttttcttctttctttctatgtctttatcaccttcagagaaatttgtttccagaattaaaagtgattgttcaaggtgaaatttcgctcgtgaataactttcaaataaaaaagactctccgatattatataaagaattggctttttgaattataaaggcaggatttttgtcgcaaatttctaatagatcattacaaatagcacgtgccaaatcaactttattttgcatcatataagttacaattaaaccctctttaattcttgctaagtaactatcacgtttgtaattgttaaatatttttttaactttagtttcgacaggagttatacgcttgaataaccttttatattctttcatttggtataaagcttggcacatcaaaatactagttaggattttcatctcatttgttgtaatttcatttttacacgattcaagatcatcataaaaatctgccggttcatatttttcattaactttaaaatgtgtatatataatatcataaaccttcgcgcactctttgttagcgattgttggagaatttttttctgactctataagttctttcaaagaatcgaattgtctttgaaatgcagcatattcaaaagcttcccgtttattttccggttttgcaaatgctaaatagtcggatatcatctgttcttccattgatacaaaagatttatcatacagtttcataatgatctttactagataaataaaactaatttctgtttttccatttagtatgcttgataaggtactttgagctattcctaaatacaaagctaactcacagttagtaattttagatgcgaataaatcatcattgattttttttaataagttcttcatagtttgctcttttgtttttactattgtactttcttgcatcccttttgctcctcccattggaacaaagacttcgctcgttttctcaacttttttaaaggaaaaataataccacagtaatgatttagtaatatcggcatgttataatgtaaatgttactcgtgtagtgaccgaaaagagacttatggcagatgttcccctcgtgagtcgggcgaacggtgtaagagtgggccaaatcactcttacacacgctgtgagtctttttttcgttccgttttttattgttatcataataccacaaatttcccaaaattctgtcgtataatagtctgaaaactattgagaaaattgaaaaaccgctttgtatcaacgttttatgtattacatggaataaaaaatgcaattatgcatttcatcgttttttgaacctgtatgaatattttaccacaaatacgaactctcgttccttttatttctacacagactcataatgaatcttcacataacataaaggtcacataattaatcataccattcgaatatataccattattaccactcgttcgcttataattgtcgaagattataaagggcggtgaatagtcattgcttagcgaacgactagtatactttcgcaagaaaaacaaattaacacaaaatgatgtcgcttaccgtttgaatgttgtccgttcaacatatacaaactgggaagcaggacggtctgaaccagatgtatcaactctcattaaacttagtgatatatacaatgtcagcctcgataacctagttggcaggacatatcgaatgcctccacagttcgaagtcattttagatcaaatatccgatttagatacagaacctaaaaagaaagcgctcaatcttttagtcgaatatacttacttaattaaaaagtatttcatgtagctatcacacctttcattttcgcttgtaagcaattttaaattcagaaatgattaagtccatagagataatgtaacgacaaaatttacagccttttaaactcttatatttaaaatccgaagcattgacaccttagagaacattacgctctctttttacatataacccaaaaatgtaactatttggattgttgcatttgagtatatagtacatttggattttaatatagactagcggtaaaatattcttgtaaagtcagaaattagtgaatttttgactatttccattgattttatgcggttattcggaaatatgcaatattacatatccattaattgtaatgtaaaccatgttttactcgtatcaaccaactcaaggaaatgctataatccgctttgactaactgctacgaaagctcatgccattgctaacgtttgcagtttatcatccacaactagggcgactccctagattgcggtaccattccgcagcccttaacaatttgttaggggcttttttcatttctgttcgacaaaatatgacaatattataattaaatgtttgctatgataagctcggaaatcttacattttacataactggaggtaataacatgtataagaaacttggtaccttagctttaacaggcacattagctttaagcttagctgcatgtagcgaaactgaggaaactgcaaaaaaagtatctagcgaccaaaaaactgagcaaacagatactaaaaaagaagatagcaaagagtttaaagttggtgaaacgattcaactaggagactataaattaacagtttctaatgttgaaaaatcccaaggtggcgaattcgacaaacctaaagaaggacaagagtttataattgctaacttaaccatagagaatggcggaaagaaagaaatcagttacaacccattcgattttaacctgcaaaatagcgaaggtaacattgtagaccaagcgtttacaatggttaatgaagagactcaattgaattctggtaaattagctccaaacggaaaaatcactggaactattgctttcgaaacaaagaaagatgacccgaagctccaattaatcttcaaacccaattttttatctaaaaaagaagtgagaattaatctacaataattaaataggagtgtttattttgaaacgaacaactgaatttgtattaggacttattggtggtatttttggagtattaggtgctgttttagctttaatgataggtggaatgggagcagcatttgaagctgaaggagctgattctattatcgggttaggttgggctgcggtaggtctatctattttaggaattgttggatctatagtcgtgagaaataaagccaaagctggcggtatcatgatgacaatcgcagcaatcggaggatttatttgtatcttcgtattctatatcttaccaggtattttattattaatcggtggattaatgggaatcttccgtaaagataaggcttctgcatctgcataaaatgagcactcgaaagagtgcttttattatttctcaatgaataatatagataaatatggtaaaataggaattgggtagtattctattaactctctcgttattaaaattaaagtggttatcaagtcgaaggaaggcaccttagggtgtcttttctttagggaatttataaatgcttcattacgatataaagactcaaatcaatacctttaggtgtgaaataataaattcaacttgtggatatccttacttatccacaaagaagaccgtcatttatttgacggtcttctcttttactcttcttttttcaacaaagttctgctatcataaaaagagtagatatataaattgcaaatgtaaatttttcatataaattaaaaaaacaaatagaaaaaccccgacgaaattttcaaaggttgatgtaagtttgtccgcctactaaaccgatgaaaattggaaactggagatcgaggtttgtatgaacatatttaaagttgtatcgctacgtctatgatagcatatactttaaaaaatgtgaactacaatcctctattttcctatacccatttttgggcggggtggaaattggaggattttttattatgtcaaaaagcaaacgtgaccgtcgtattgatggtgaaaaagcaagtaaagatttatattttcaattgtttcagtacttattctatgaaccaaaatatagaaagctagataacaatgctcgtgtcttatattctattttacgtgatcgttacaaactatctgttcaaacttcacaaagtaaagatacatacgtggataacgaaggatatatttattgcatcgctgataacactgagctaagttatatgcttatggtatcagagccaatagctatcaaagctaaaaagcagcttcatgatgtgggcttattggacgaagaacctgtaaaagatggcgccaatcgtttgtatgtattagaaccagaattaacaactgataattggatgtataaagctgaaatagaggatctacgaaaaaagaaaaaggcaaaaaaagaggaagaaagaaaaaaacgaaaagagaaaaaagcatctgagaaagcaaaaaaagaggaagaaaaaactccacaaccagttggtgacttaaaaaacttaagtcaccaggaaaataggggttcatccgaaaacggtgacttaagaaatttaagtcacgtgactaaagaatctttagcgtatacaaaagtatttaatatacagaacgattttaattactttagtaagtatgtaggtaagagtatccctaatctcattattaatttttataatcaatatttcaaaacaactaagtacgcaaaaattgaattaactaaaatgtgtgaagaagaaaatgcagtattagtattcgaatcaattaaacgtgctattgatggagaagcagataaacctattgcatacataaagaaaactatcgctaattggaatgctgataattgcgagacattagaagatattcaaaaatacgaagaaaaacatcgtaataagaaaaatcaaaataaaactaagggcagctatactcctaaaaagaaaactgtacgtaaagaaatggttccagaatgggttggcgaggaagatactggatcatcaactatggaagacaatggacaagcttctgaagaagagcgtaaacgtttagaagacgtattaaagaaatacaaaaaagattaatgtcatataggggatgaatacgtatgccgagaaagttcaaatttactgaagaagaacaattacgatttgatcactttgttacaacagatgaatttgcagaagtattagctatcgcatggagatacggttccaaacgaaatgacagtttctcaataagaagtcaaagaaaatggattgttgctcgtttttcagagttggttgaaagaagttggtctataagatattgcgaatatggaggcgatgaaccttattgggaaggagcagtatgtttaaatcaccctttagtgaacatgctagttgaaatgggatggtcccaagttactaaagaggagcgttcttttccgataggcgattttaatgaactagtgttcgtaaagacttttattctattattacacgatttaggaacaattcgagaaaaaagaaaaggtagaatgatagtccgtccacgattacgaattcatggatcagttgatgtattaaacaatattggtcgggtcctcaacaatgaattaaatgttggatttaaaaaattgcaaagtgatcaaaaggttccaagagcaaagacagtttattttcaatctaaatttgaaatacccaagattttagaatttgttggagctgtagaatccttagataaatttaattcgcttgatctaggatctagggaattaatgagagtgtgaaatttcacacaccgtactatttttatatcttctaaaactcagtatataggggattttaaggaatattagggaggacaagcttatggcttccctacctttctacacgcattttataaatttagcgaagccattgcgaagactaacgacctcgcaaaaagtacaaaccaatggttaatcaattgtattttgttgtttttggcatattttattgaaacctagcgtaaatatctgttagaatcaaaataccaatgattaatcaatggttatgaaaggggaatgtatatgttattaggaaatccatacgcgattgacttaggaaatggctttacaaaacgcgcttcaaagaaaaataaatcactagaggcagatgttattacagaattatctgtgttggctcctgtagacgactactacaatgaagctagtttcacgaaaattgaactaacaaacactgacttcccatactacataggagaagaagctagaaaatccaaactaccattaatccgtgcccttggcgagaataaagcgaagcgctatgaggatccaacatttaagaagcaattatttggattcattgcaaaagactttaaaaagaacgttacaattccgttacttgttacaggtcttccagtatcacactttggtaatcaacgtgaatcgattcaaaaagtagctatggaagaaacagcagtaaaagtaaatggccagttaatcacaattaaagtgaaacaatgcttagttattccgcaacccgtcggcactcagtattacttagtgaagaaagaaattattaataaagaagatcgtattcttattatcgatggtgggtttggcacatttgatgttactgatatgtctggtaatgctgttattgatcgtttaggaactgaattaggctgtgagaaagcatttatggctattgaacaaatcgttcgcgataacattggtgaaacacctgatttaagcgtgtcgaacatgcactatattcttgagaatggctataagtacaacggctctctatacgatttatacactcataaagacgtagctgagaaggttgatgaagagttacaacgtcattttgatgcagcattacgtgaagtttctcaaaagttcaacttagctgtatacgataaaatcgtctggactggtggaatggctgctcttcataaaaagcgtattgagaagaaaaaagagcaattcccaacatttgcggttctagaaaacggtcaagaagctaacctattaggatactactatttaggatgtgatgtctttgacaaacttacaaaagaaaaagcttcaaattgagctaaatccaaacaatgacaaggttctgtataacttcgtaactcgattagaggaacaaggtaaaggacaaaaagggtatgtaaataaacaaattaaaaagagattagaaatgtaccaggtacttgctgaagttgcaggagaagaagatccacttcaattagttaagaagttactaatcaatataaatactcatggcatacagaatgatgcaggagtagatgaaaagccttctgaagaagtcgttgataatgctatggatttactagctaatttagataaaagctttatgtaagaaaaattttactccttcctccctcctctcaaaaacagcaggaacgatagcatgttggaattatgtccctgagaatacagaggggggaggaggttgaatttgaaaggggagagcatcatgagcaatgttaaccctatgtttagtttttctagaaaatctactacaataacaaatcaacaacctcgtaaaactcgttctgacaaaaagaaagatgtaaaaatccccgtaaatgaaatacaaagacaattaataagatcttcagcgttccaacaaaatataactactacacaatacatgtctaaattgatcacagaacatctcggaattgattatattagtgaaatacatgcgtatgaatataaggacaccaaaaagtacattcacgcaaaattggagcaaggagcgcactctaagcttgtccaattagcgattgaatggggagtttcgcaaagagcagctgcaacacgtattttatgctttgcattacgcaccatgtagggagtgagcgcatgtatagtaaatacgacgttatgacgaaagaaatacagcttatgagtgctagtaattggtgggagcgaacgaaaattgaatggaagttaaaagagaagtaccgttttgaagtgaagatgctcaaaatttacttatttcgaatgaatattattatcgaagatatggaagaggaagattacgagtgtaatgctagtgatctagctgagatacttgttgaggactttcttgaacatatacgctctaaaaatagtatggagcagctgtatcaaatcctagagagcaagaaacattatacggattttaatttggagtttaatgaaaatgacgatcgatacggtacaatttctgtaaaaattgatagacggatattaagacgaattgaagtgtttttttcggatatggctcatagtttccctatgcacggttttacagctgaaaaattaatcaatattctgatgtgtgactacatgcggttttatgctgaagaaccagggaagaaactatctttgttgaagcgaagattttcatagtgtttaaatttcctatttttgagatgtttaaaaaatgaaatctttgaccactcttgtactaagaatttaaaacaggagtgataaaatgggatggcttatttctggtaaagggagaaaatcgaagctctccaattttctggagaaaaacaaaattactcaacaggaattagcggaaagaagcggggtaagtaaatcgactattagtcgtgtatgccaaggagataaattttcgccaaccatgaaaaatgcacaaaagattataaaagcattgaagaaattaactaacaaagatgtacattatgatgacttttggatgtagctccgttaaaaacggggctatttattattagaagtaattattttgtttttggacatttttttactataaaaaaatgttagggtaaaagtgtcagtccgtcctaacaaatttttaaaaattaaaaccccttaaatacaggttataaatgagcaaaaaagtaagagtttggaccccaacttcagcgtacatattttactatcataattaatataattcatctctttatttttgttaggatggcctaacaaaagtcccctcaaaaaaagggggaatgttcgttttcctactgtatgttatgatggatttgcggttcttatttgttcaacaagccaagtagaattacctaaatcgcacactttctgaatgtagcacatccttactactcataaggtgtgctccgcctttgtataaagataaataggaggagataaacgatgcgtgatgtatatccggtcaaatattatagcaaagaaggatttgtagaacgaaaaatagagattaacgaagaagatttacagaaaatcattgaagattatttagataggcatgcagactttgattttgatgaacttgaggttgtaaataaccgtcctatgaatatttggttatacgcaaagtgtagaaagtatgtagatgaagaaaatcctgaagatgatcaagctgtacatgaagcagaattggaaatcacaggagattatgacggaaatggtatattttaaaggggtacggaaacgcttccttttttgggggtcactcacaaagtatgaatatatttaagcattgtattgggtcattgctatacatacctcgtattttataagaaaaaggatacgttatttgattaacgtacccttttttatttttttctatatttttcttgctcatagatactggctgccattccagctcggaataaaataaatgctccatgaactactaatgggactacgccaccatttgttttaacttactttacatacacataggcttcacttgctgttacatagtatgttttatttttcaaacttcacatattcaccagaaacccattggtcgccgccaacattataccaaccgtctctatatccccaagattgatatctttcactttggtacacattttttacgacaccatagttagttcctggaccagtacgaacacgtaatacatcagctgtaatagttactacaccaatgccatcatttgaaggtttagaaggagctggtgcattttctcctgtataacgaatatatgatgaatcattatatacccactgatcgccacccaagtttagccaaccatttgactcaccccatacttggtagcattctcctttacctaacttacgaataactgcatatccagttccaggtccttttcgtaaattcacgttatcgccattaatgtaagcaacttttgtaccatcgtttgaaggtggaataggagttggcattactggactacctccaccgttatatgcattttggactctttcaataaaactattccaacgtccttctgctaacatacgatgaggacaatactttccactccatgattgatgtgtgcgaactttactaattggaatattgtactgtttcatgagcccagctacgacgatagctgcattatcctccgctttataatatcgatctccaccacttagagagtaacagatttcaactccaatagatttacgatttccgttaccgccaccatcaccgcaatgccaagcgttacgctctaaaggaataccttgtacagcttctttatcgtctaccgcaatatgaaacgatacttggttatcattacgaatcatataagccacttcgttatttgctgtagcatcgttataagtattgtggacagtaatgaattctggattcattgtataagggcacttagtaccatatttgcttgcatcaactaaattttttctgatttccattattaaacatctccttttagtgtaagtcatttttttctaatacatttttttgttgtaatcctttgttgctcaaatagttgttcttccacgccatatacaaagtgaatgctcctgtaattacagcaactaaatcatttgtcattttgtcatcaatcgtttggtatcccacaagatttaagacactattaatcacagcaatcactaatacgacatagcgactaattgaagctgcatcaaagttcctcatactctcacctcctccaaataaaaaaagtgaccgtatatacgatcacttccctgcgaatttaaaaagagccattatcccaccggtgataatagccccaactactgtagtaccaatccaaaacactaacttatctaatcgatcaattcttaaatgagcacttttcgctgactgctgcgcttcaattgcaacatccttaacattaccaagtgtatctagtttggtttccactctggttaatccaactaataattctttaaagtcatcatttttttgttctgacatttattcagcctccttttatgctgcgaaataacttgggtccattccaaatatctctgcaatatcttcttcacttctatccttcagataagattcagtcgttgaaatatcagaatgattagcgagtgattttaatttttcaagtggaacaccttgtacttttaaattatctaatctgctatggcggaaacagtgaggattcattttaaattccttcccttcctttttgttcagcatcttagcaaatatatcgcaccaataattaaatacactcttgttcaatctctttctctcaccattcttatacacacgcacaaacaaatctggaatagtatccttacctcgctgatttatatataaacgaatgcatttctgcacccggtgattgtaatataatctaaacttcttaccccgttttcctcgtaccacatttgtataatattgttctgtcagcccttctttttgaacctggtatacctcattctttctagctgcactgtaataagaaagtgctaaatacgttgctaacatatatctttcttgtgctattagctcatcgattaaccactcaatttgttcttctgttataaaagtgatttctctaactggattcttaggtaaaccacgtacccgtgaacctacattaaattcataatcatagtcatcatcatccgcacaaaactctaacgcggaccttaatgcactcattaatccgttcacacgagcattagacatcctcatatcttgaaaaataatagataaatttcgaatatctttacgcgttaaatcaataagatttttatttccgaagtgttgatgtattagaaacaaaataattcgtaaatcccaaccgtattgctttaaagtgcttgccgcttttccttgtgctttcttttcaatcagaaaatctttgactaggtttttatttccttggctaacatgcttttcgtaaattgcttggtctactattcgtttcacactaatcatctcctcaaaataaagagaagcgatatcgcccctcttgatctatgatttgaatttattcaaagccgtactttgcgcaaaataaaaaacagcttatggctgctctggtttctcatttattaattgttgtactaatacctttaattcatcaatttcagctttcattgaaactttctcaagtttttctgcttcaagttgttctttaagagtgtcaacttcctgcttccacataccgtggtcaaattgaagatttttaactttaaagtcaacttcttgtattgcttgaatagaaattgcaaccgagctataaagtgttacagcgtctttttgtggtgtggtgaatacatcgtcagagtcctccgcaatcataccgtaattaattggggttgacctaacagcttgcaatcaccgtttttccttgcccccttatgggcgcacgaaatcaccataacaatatggatacctaaaattatttttatttccaccacaagtatacatcgctggattttgatcaactttcatcttagaaaactttttggctgaatcctccgagtgttgtttaacttcttgactagcaacaaaatcaatataccctggccccatattatagctttgaataattgtatccatgctaacatccttgtccgttccatatttgtacattttagcaaagtgttttaccccttgttcaatgctcaagcttgtctcttgaatttcatttggctttaatccaagtgattcggatgactgcataggatcgtttccctcacctctactctcttggtacataattcctaataaaactgctgttttctctcctaaattatatttttctaattcttttttcaaggtagattcatattgcaatacacgtttttcggtggctagcgctttatttttttgaatattggttttatgattaaaatatagcattccaagtattattcctaagcctaaaatactaataaggaacacttttataatttgttttttacttgtatccttcatatattcctcctcgtataaaaaatttaatttttcaaaggtaattggttatttacaaactatgtaatgaacatctatctcccgccctttttagactcaaacatcaatactttaaggttttaagtttaatataaaaatttaaagataaggtaaagataagataaagataagataaagggcattttttatacgtactttaaaagatattggtacaaaggggtatgtggggaaatttgttgatataaatggatttagtaataatggaaaggttaacgtacaaattattaataatggaggtatcattccagatgatttaccctatcttttcaatatgctttatataaaaactacaacataacatataataaaaaaacggcgaaccctcgacgtaggagaatccaccatcacaaataaatgattatttcacacctagtttttcttttactttcttaggaagctcatcttcctgcacttcctcccaagctgttacaccttttttatctaaatgatatacacgtaggaatgcttctttacgaagattcttttgtgcgataaattctaactctttttctttaccttccttatcaaaacccgataatgtatattcatactcctttcccatcactttaccatccatagattttgaaactcctccttttccatccatattaatttgaacgtaatattcacctttaccaatacggttgatatcacaccaaactaaaacacttgcaaatacaacttccttattttttacgtacctgtatatttttatctttttactcacttttatttttctttcttaactaacttatttaagataatctcatataaattacttaacgaattaatgctatttgcgacataaaaaaagagaggcgtctgccccctcttagaagtgaaattcaacttgctgttcttttgtaattgtctcatcccctcaggattaactgtgtcgctaaagagtaacttagctgatataatctcctcaagcttactcttaatgaatagacctacgctaccttctttcttcaccttcccatagaatttgttagcattctcatctttctcctaactaagatcttttacttttactaatttcatatgagaaatcccctccaaatgtacacactaagaatgagatttgatagaagatacttgtctacattttaacttttcctattaaaactggaatatttggtaaaatgtattaaacacgcaaataacttgatatcgtatctcatgattttaataatgattctgtttttcattgtagtaaggttgtttatctcatattgaattacctttcatttttcttacaggttcgcaatatttttgaaaagacagtttataaagccgagaattattattttttaagagatagcattgaggagtttttcatatgcactgtactatacggtactagattcccgtacagatttcatttacaattcattgtattttctttaccatttaccaagttaaaatggaacaaatttattacttagagtgtctattatgtgtatccctaaaaatatgaaaggacttattattccccaaagtaaagtgatgtaaaaaagtgtgtattgagatacttcatttaaatgttacgagtttaatactttcacgggtaaactataaaaaaagaaacaccctaaacagcaactgttcattcatataaacgctttggttctgcttagcctgttaaaattcaacttcagaagtatcggtatccaacacccgctttaattaacatcggtatttaaaataccaaaacaaaatccatatatcgttgaaagaggttgaaaattcatgtacgttttaaacaagttctttacctacaaaaagattgtacccgtcgtattactttcatgtgtaacactaatagggtgttctaatagtaatactccatctgaaccacctaagcaaacaaagcaaacaaagcaaacaaaacaaataaagcaaattaaacaagaaaatacaggtcatgattcttttgctaagcttgaaaaagaatataatgctaagcttggtatttatgctctggatacaggtacaaatcaaactattgcttatcattcaaatgatcgttttgcatttgcctctacatctaaatcattagcagcgggagctcttttacgtcagaactcaatagaagctcttgatgaagggattacgtatacgcgtgaagacctttctaattataatccaattacaaaaaagcatgtgtatacaggaatgacgttaaaagaacttgcagatgcttctgttcgatatagtgacagtacggcacataatttaattcttaaaaagttaggtggtccatccgcatttgaaaaaatcttgagagaaacgggagatacggttactaaatctgaacgatttgaacctgaattaaatgaagtacatcctggagaaacgcgcgataccagtacaccagaagcgatcgctaagacacttcaatcatttacattaggatctgcacttccaacagagaaacgtgaattattagtagattggatgaagagaaatacgactggagataagttgattcgtgcgggcgtaccaaaaggatgggaagtagctgataaaacaggcgcaggatcttatggaacaaggaatgatattgcaattatttggccaccaaataaaaaaccaattgttcttgccatcctttctaatcatgataaaaaagatgcagaatatgatgataagcttattgcagacacaactaaagtcgtattagatactttaaaagttacgaataaaaactaataaattaatagttttccgtggttaggggacatattctctaataagagtaaccatacatgaacgtcaaatgatgctaaaaaaagaaaaaacacgcagttccatttggaattgcgtgtttttattttgctaatttattttggataaccgcttgtgtcatccagtgctgattagtttgcacatggtcttttcgaacaaatgcccctatggattttgaaaaatcattatagtgaaacgcatccgttaatctaagtacatacccctcctgaatccctccaaagagtgaagtaccgttgtagcacgaacgaattaccttttcattataggggccacgatataacactggaacgtgtgcaaggcctaactttttacaccatgcaactgctgcatcccacgataaacattcatttttctcattctatattgaaaagacataaaaataggacgtcagtgctgtgtagtgaatgccatgacaagcatacacattttcaccacatatcctccagccttctggaattctatccccccatacttccttgtaacttttttacccatgttctcgatgggttatgaccacttgataacgaccttgcatgaatagcatctttataaagagatgtattttcaccatctaacttcgtacgattaattacttcctgtagtagcctttctactgtatctattttatctcatttggttttctcaatattctttacttctattttttgattgttataactggcactttcttagtatcagaaatttcactgtaaccataataaagtagaaaaaacaataaaataattgtccaaataaatataaacactttataactatacttcatatgaaaaacctcattttccctatataagtgaatgtacatacaccttataaatcctgttacataaattattggatattgcagtagtagagaatcattaagtattagaaattgttattcataaacatatccaagaaatcttcaaaaaatatcatctagacattttaacatttcataaaaatgcacagataatatttttacgtttagctaagtaatgcttattatgtaataaatccttatctctatttcaccttaatatttatatgtacaagagtctgtgtagcaactaggctgtactttaaatatgtactaaattgtgtgtgggaaaggaagcacattttatttaaagttgttactttgaaccctttaattagttggtagtcttcttcattcagacagaaaggaaatttaaagtgtgcacgtattttcaactcagactctttactacacacactcctatacacataaaacatctatacctttcgtaacattaaggaaacaaaaggaaatgatatagaaataattataatatttcgtaacaaccttgtaacacaaatgtaacacaatacatttaatcgtacaatacttttttagctaattatcaacaaagcattgttaatatcgttcaaatttaataatgttcccataaagtaatacatattgtttgtgaagtgttttttcaaaatataacgaaacctaccatgacggaggaatgttaattcaatttaagaataaatggattgatacctttctagcttttgtatcccaatcatagtatagagaggattattgttatccaataaatgtatgtgaacatatacaagctaagccttctaaataattactgtaactaaaaaaacaagtaattatacttgtttttttagtttactttccaatatcgcaacagttttatgtgctctcttttcctgtctacattattggatgcatatcttactaaagatagcttctttttttatgattctattgaagtaattaattgctgacgttctttatctctataaattttcatttcatgtttaaactcgtaatttcctacttcaaatctagcccattccttacttgtccaatatactacatctacattttcttttaagattgcagaacacacatccactaattcatctttgtaaaatggagcttcttttgctaattcaaaagcaagcacttttggatccttagttttaatttgaagttccctagaggtttgccctaaatactgccatggcgatggtattgattgaacttgggcatctcccctatcttgaaactgtgatggagaataatttgttgaagcaaatgtaggtttacttactcctattgctgttcctaaaacaatagaaccaataataagttttttaatcattttttcagcccctttaataattttggatatgcttcatttttataccacgttcacagtcatgtaaataaagataatttgacataattctgcgttttcctcgaaaaatgcatattaattacacaccttaaatttaccgaaaacaaaattgttggttaatgtaaactttcttgtcgtaagtatacaatttttgtataaaaattagtttttaaaatatttgcatacttattgataaagcttcctgccataccttattcgaagccaatttacctctacctactcacttcgcattccttgaagaaggaatcttcttgactaaaacgataaaaaagttggggatttccccaacttttttatacgtttattgtcttattaatcctgtagatgtaacccgatatgttcttttctttccgatatattcctgttttccattctcaaggttagttaaagtcgcgcgtgttttttcctttgctgcttccccttctatatgagtaaattctatataatctccctcttttacaggtactgtttgggtttcagcattttgttgtctatttcccataatttccttattgtacataacgctaccagatgagttctggactttaatacttgcatatgtgctattgaaataagaatgcggtacaccagcttctaatattcgctttaaaacttagatatatttaatatttttttcactactattattaatcaaattatagtattttgtattaaaatcttatgatttaggactaaataacttaattgatcacactatttgactcagaattgtttaccagaaaaacgttatgtaaactttctattttgtcaattagacaaaatagtttatttgctggtaccttatcattagctagaaagagcctactaaaaaaacgtagactcctttaggtatctaaacattacatatatttcaaacgtagattcctctaacgttaacacctgcccaattccagcgttgtttacaaggatatcaaatgtagtatcacctatatatttttgaagagattgatccatcattgaatacaatatattaatgccattaaaagtacttaagtctgcacgaatcgcaaatacggaaccgccatcttttttaattttatccactacactttctgcttcttcttttcttttactatagtgaacaacgactaacgcaccagcccgtgccaaatgtaaggcaatacttcgacctatccccctactagcccctgttactaatgcaattttccccttcaatttattcatctcatcatcccctggtttaaaaaaatctacttagttatatcacaagataccctttgaaatgttgctcactaatttgatatccataaaaccaaaaggcccactcataattataagagtcggccttttcacttcacatattcattagctttacatacagcatccccaactgttatgtactttgtactaagtataataaagactctaaatggtattataggtaaagccaacttaaactaaagttaattcatatacattttgcttagagtctctgcctttaaacagttcgtttaggattctatgcatatattcaataaaatttcagcaatgcctgtatttttcatctttcatatttttctttattagctatgagtatacttaaaaaactaaaaactatttgataatcttttagaatctaactttcttttaatactatttgctatttcttcaatattttcatttagaaagaaatgattaccttcaaaagaatgaaaagtacacgttttacttgtgtatcgttcccattttattacttgatcatatgtagtaaattcatcattttccccattaaatataagaaaatcaatatcacatggttgtgtatttttgtcatgaatatacgtctcaacgattttaaaatctgctcttagaatagggagaaaaatctccattaattcttctgattgcagtaccccagatggtgtacctcccattgcaataacttctcttttaaattgctcattagaaagattatgtcggatattttttattttactatttggatgatttctaccggacaaaacaagaaattcaggcgatacgtttttagaatcttttatttttctggctaattcataggcgatcaaacttcccatgctatgcccgaatagaatgtagggcgaatcatctatctgcataactattttattgtagacatcatttactgcctcttccatactttggtacaagttttcttcaattctatatcctctaccagctagctctatcgggactacctcaatatatggattaaagtgatttttccattttgcgtaactaaacgcagatcccccagcatgtggaaagcaaaaaagtttagtcttctgcattgattttctccttactttcaaatttgtatatattttggcaaattgcataaatgtctttaattattatctcttgcggaaattcatcccttgttgcacaagcagataacttataatttggatcaatgttatattgtttaaagtaaaagtttttaggtatattcttgtatgaaattaaagttcgtgattctttttttatagagaatgaatttaatggggtataaagcccttttccaatcgtttttatatagctttcttttaatgtccataaatcaaaaaaacaattaatttgttcatcagaattcatattagatatatcataaaattcatccgctgaaaaaaattcttttgctaatttaagagcctctatctctgaagtcttttctatatcaatacccacattaaaattagcagtagtacaaaccacccattctcctgaatgtgacagattaaaatgaaagtcagaaaaattttcaacaaaaggttttccatactcattatatttaaatctaatttcttcattattaattttatacttttggcagattagagatcggattagtaaatcccctatcagggtcctattaacgtcacatgagtttaataaacgcttcattcgttctttcttctcatttgaaaccaagttactaagttgcttaaacaaatgactttcaatattctttggtattttcacagcttgaatgtgtatgataaatcacttcctttttttaaagatggcttcatatatgtgcgttacataaattcaaattaactttattaaattgcaaatacaatagaaaaggtgcatatttacatatcaatgaaaatatacacctttcctcaataatatcatcaaagcattagtttctattacaaaaaatagagaggatttacatcattctatgagcaactcatataggtttctatgtctctatcaagtaaattttccattatcctcttaaaaattaatactcttgatatattcattattgcctacactttatttgcagttattggtctccccttttcattcatagcgttgcatcttttgcactctctacttttcagttaatgaaagggatgtttcttttatcccttcaaattcatttaataggtacttaactatcttttcaactgcggggaagtctactatttcctcatgtgatccagggactgaatacctatttactcttccttttaataaaggtccccaatctgtaaacaactcttttccttcctcagcactaaagtagataacttctccaaagtatggtatcaaatcattctctgccattaagttcaggcatttcctatgagcattgataacttgcttcaaattcataagatttgcatcaggcgggagtactccttccataattaatcgctccacaagcatatcttgcttatgaacgagcccttcttcctgctcagtaagatctctaggaatgaaatgttcagatatatatgagagcatatcctcccttgttttacgatcttgctctgaaggtactttagtatccattagtatcaacaactcaacttcctcaccttgattctttagcacagttgcgatttcataagcaattgcaccgcctaaagaccatcctccaagacgatatgggccttctggctgaacacgtttgatttcttcaatgtaaagttgaattagttccggcaaggtcaattcatcaatttcttccttttctataagaggattctgtaaaccataaaatgaacaatggttcttaagtaatcttgctagttgaatgtaacagaatacattccccataaacggatgaacacagaagaaagggcttttttctgattcttgtagtggaactagcgctgctactgatttcgtcatatcatgcttatcacgaataaggcatgcgattccttccaatgttggattcttaatcaatgttgaaaccttaatctcttttccaaacttctccctaatttttgaaactaatttaattacaaggagagagtgtcctcctctattaaagaaatcatcatttacatagacatcttctatctgtaacacatcctgccagattttaatcaactgatattcaatttcatcccttggaatgattggtgtagagaagttattttctctatgaatagttaaattgttcaatgcctttcgatcaactttgccattcgttgtaagaggaatctcgtctaccttaataaagtgtgcgggaaccatataatttggtacttgtgtcttgagatactcacgccactcatgcatactaccatctccaactacataagcaaccaatctctgctctcctaatttatcctctgttgccaaaactactgcttcttttaccaatggatgcctctctatactcgcttcaatctcttcaagttcaatacgaaagcccctaattttcacttgattatcaattcttctcaagtaatctaaattaccatcaggtaaataacgaaccaaatctcccgtacgatataaacgctcttcttcattaaatggatgacagatgaatcgctctgctgttaattctgggcgattcaagtattctctcgctatacctgcacccccaatatatagctcacctgttacaccaactggaacaggtaacaaatttttatccaatacataagtttgaacgttcggcaatggacgtccaattgttactctcttactatcttttttgatatgatagcatgttgcatcaaccgtacattctgtaggaccgtatacgttataaaaatcaatcttttcagtctctactagctgttcccataatgacggcatgattgcttcaccaccgaccaatatcttgcttggtacatgaacatcagcacttatttctagcaatcctccatctattagtaattgaagtaatgaaggtgtcatatcaaacatttccaatttattctccctaatataggacacaaattgttctgggttagtgcgaacttcacttggaataatatataaacttgaaccataaagcagcatttgtaattgctgaatagatacatcaaaggcaattgatgcattcaaaccgacgcgcatattactaggtatctcatgtgagaaaacttctttttgtaaaccatatgataggtttattacagaatggtgctgtactaaagctccctttggattccctgtcgaaccagaagtgtagataacatacgctaagttttcccctgttacctcacatattggtgaaagtttgctttcttgagaaagcattgcttggtccctatctaggcaaactgtcttaatgtctttaggaatccagcctagtaatacttcatttgtaactaacactttaattcctgtgtcttctaaaatatattgtaggcggctttccggattcgatggatctaatggaacataggctgctccagccttccaaattcccatgagaccaacaaccatctcaactgaacgctcaaagcaaaggccaactaatgactctgtcccaattccacatttctgtaaatgatgggctaattgattagctctttcattcagctctcgatatgttagttgctgtttttcatctaccactgccaacgcgtcaggcgtacgatttacttgctcttcgaatagttgatgaattgcattctcacgtggataggatatagtattattattccattcttccaatagctttctttgttcagcttccgtaatatatactagctccgatagattttgatcaatgtttttgagcatttgcattaacactttgtgtaaatgacccagcattcgttcaatggttactctattaaacttactacggtcatacattaactttaacgataactggattcctggaactacagctaaccctaatgggtagtgggtttgttctaccccttccaattcaccaatttccagattttctgaagactcctctttcactggataattttcaaacacatataaactattgaacagcggtattcctctaggaacttcactccacccctgaatctctgtcaaagaagcatactcatattgtcttctttctatctctccctcttgtatcttctgcaaccaatctattaattttatatcatccatcaattgaattcgcgtcggtgacgttgtaatgaaaggacctacgatgttttcaacatcaataatctccgtagaacgtcctgagcttgttacaccaaaaacaatgtcattttctccactatatcggctcatgagatatgcccatgcaccttgaattactgtactcaaagtaagtttattgcgtttcgcccatccttgtaacgcttgagtctgctcttctgataaatacgtaaccttctctgtgtaacctttttcttcctctttactttctaagcccagcaaagttggcgcagtaaaaccttttagcttctctctccagaattgttccgcctgctccttatcttgctctcttaaccattggatatatttcttatatggtgaggacttaggtaacttcacagcttctccattcattctcttctgatagactgtaagtaattcattaaatactaatggtaaactccatccatccagtaaaatatggtgatgggtccaaacaatccgatattcttcctcaccttcttgaatgactgttacccgcatcaatggtgcttcatcaaattggaaggcttgttttcgatctaatgccaaaaagacttttcttttttcctctatctcttcacttgtcattgtacgccagtcttctttattcactttaaatgggatattttcatacaccacttgtacaggttcttcaatttcgtcccatacaaatcctgtacgaaaaatttcatgccgctgaattacagatttccacgcctgctcaaatgtaggaatattcatttttcctcgaatcataaaactcaattgcactatatacggtgcaacatgttcatccccttggtcatgcaatgtgtggaaaatcataccttcttgcaaaggtgatagtggatataaatcagtaatctgattgttctttccgcgatgcattttgtttagtacatttgtcaaaccttcttggctaagattagccattgcaaaatccgaaatggtcagtgcagattctctatctgaaaattgaatcaatgtactcagttgatatagcatattctgtgcaatactttgaatcgttgatttggaaaattgtccaacattgtatacccaagtgaactgaagttttccatccgttacaaccccaattacatcaattacatgcgatcgcttggaaccggcagcatgatctaaacgcttaaattcgttctccggaataaacattgcatcgctagaaaacatttggtcaaattgtccaagatagttaaaactaatagacggtgtatattgggagcttaattgctcacacattgttgcgttcatgtaacgcaacaccccataatcaacacccttattaggaattttgcgaacttgttctttaactgcttttaatgcttcaattggcgtattagcactagtaatatttaaatgaactgggtaaatacttgtaaaccatcccacagttctcgataaatcaacatcttcaataatctcttctcgaccatgtccctctaaatctacgctcaatatcggctgccccgtacatgctgccgtagcttgtactaatgctgctaataatacttcattgatttggacacggtgagtgcttaaagtctcttgcaataacatacgggtctcattctcatttaacaccacagtaatttcctcagttactgcgcttactggattacttatagtaccatctaccggcaatttaactacgtcttgttcagcctgctcctcccagtaatgtagcacttcttttgataggccagtttcagcgtaatgatgtaatttctccgaccattctttaaaagatgtactcttcataggtaattgaattttctgcccttggactacttgcgtatatgctgtttgcaaatcttccaataaaattcgccaagaaacaccatccacggctaaatgatgaattgtccaaaataatcggccagcgtgctcaccttcatcaaaatacaccattctcattagcggaccatcatgtaaattcaaactttcttgtgcaatattaatctctttttgaataacctgatgccaattagcttccggcacttcgtctaatgaaatgacagtaagcatcaattgttcttctattccttcattccactgtttccaaaccccattaggtaaacgttcatatcttaaacgcagagcatcatgatgaagtagaaggttacctgccgccttttccagtgatcctatgtccaatttctctttcgttctaaagaacatggattgattccaatgatgtgggttaggatgattttgtgcaaaaaacctttgctgaataggtgtaagtatcgtctctccagttataattccctgttcagcttgtacaccttgttcttctttgactacttgcgccaactcagcaattgtttggtgttcaaatatttgttttggtgtcaattgtaaaccaacttgcttcgcgcgcgagacaatctgaatgctaagaattgaatctccaccaatttcaaagaagttatcattcataccaatacgttttgaacctagcacacgttcccaaatgatagaaagcttatgttcacgttcatttcttggggccacgtatccttcttgtgttccttgataatctggtataggtaacgatttccgatcaatctttccatttatggttagcggtaattctttcatttcgacaaagtaggaaggtatcatatggattggcagttttgttttaagatactctcgccattcttctaaactgccttcgcccactacataagctaccagcctcttatctcccgactgattttccctaaccattacaactgcctcttttactaagtcatgctcttgtaaagtcgactcaatctctccaagttcaattcgaaatcctctaatcttcacttgattatccattcttcctaagtagtctatattaccatcaggaagatatctcacaagatcacctgttctatataacctctcgccttctttgaatggatgagaaataaatcgttcggatgttaactctggacgattcaagtacccccttgctagacctgctcctccgatataaagttcccccattacaccaactggaactggcaacctatttctatctaatacataagtttggatgttaggcaatggacgtccaattgttactctcttactatctttcttgatatgatagcatgttgcatcaaccgtacattctgtaggaccatatacattataaaactggattttatcagtctctactagctgttcccataatgacggcataattgcttcaccaccaaccagtaccttacttggaacatgaacgccatcgcacgtttctaacaatccgacatctataagtaattgaagcaatgaaggtgttatatcaaagatttctaacttgttctccctaatataagctacaaactgctccggatcacttcgtacttcgcttggaataatatacaaacttgaaccataaagcagcatttgtaattgctgaatagatgcatcaaaggcaattgacgcatttaaaccgacatgcatgttagatggtatctcatcttcgaaaacctctttttgtaaaccatgcgacaagtttattacagaatgatgctgtatcaagacaccctttgggttccctgtcgatcccgaagtatagataacatacgctaggttttctcctgttacttcacattttggtgaaagaatgctttcttgcgaaatcattgtttgatccctatctagacaaactatcttgatttctttaggtatccaatctttcaatgactcgttcgtaactaatacttgaattccagtgtcctccaaaatatatcgtaggcgactttctggatatgatgggtctaatggaacataggctgctccagccttccaaatccccataatactaacaaccatctcaattgaacgctcaaagcaaagtccaaccaatgattcattcccaattccgcattgctgaagatagtgggccaattgattagctttttcattcagctctcgatacgttaactgctgtttttcatctaccactgctaccgcatcaggtgtacgatttacttgctcttcaaacagctgatgaattgtactttcctgtggatatgctacagcaccattattccactcttccaactgtttttgctgtaatcctgataatataggcaacttagctaatgatttatcaggattctccacgattacattcaaccagttcccaaaatgttcagccatggattcaatagttaagctgtcaaataaatcagttctataaacaaaagtaagtaataaaccctcttccacttctgcagcagttaaacttaaatcaaacttagcgatcggagcattactttccattacttctatatttcttccatgtaattctggtagcttctgtcccgtattttgcaaagtaaacatggtttgaaaaatcggagaatggcttgtatttcgttcaggttggataacctctacaattttctcaaacggaacatcttgatactcatacgccttcaatgcttttatccgtacttgagataacaactcttgaaatgccggtgcattacttaaatcagctcgataaaccaaagtgttgacaaagaaaccaatcagcccctcaatttctcgataatttcgatttgcaattgggctaccaacaataatatccgtttgtcccgtataacgagcaaggaaactttgatacgatgccaataaggtcatgaaaagtgtggccccttcttgacgacttagttcgtttaatttatccagtaatgagcgtgacaacaaaacattatgagttaatccatgatgggtttgcactggcggacgcggacgatccattggcaacattaagactggtaactcaccagataattcttccttccaatatgcaagctgttgatatagtacttcatctttcaaccagtctctttgccactgagcaaaatcggcatattgaactggtagtggttccagctctgcttgtttttcaccaatcgcattctcataaaatgccatccattcttgaagcaagatttccatcgaccacccatccgagataatatgatgcatattacacagaagaacccattcttcttctgaaattcttatgagtttcccacggaataatggcccttgttctaaatcaaatggagattcgacttcagtttgaatccattgctccagctttctttctcgctcctctaatgaaagcttagttaagtccatttgcagaagcggacggaaaacgtacggttgaatctgctgcacaggatggccatcctcttcataaaatacagtccgcaaagattcatgacgctctatcaactgattccatcccaattccaatgcttcaggtaaccaattccctgtaaggcggcatgccattggcatattataaagggcactattaggtgcaaattgatcaataaaccataagcgctgttgggcataagatagtggaatattatttccacgttccatcggcaccaatggtggaatttctcgtttttcattccccttacgtaactgatccattcgtttcgctaatgcctcgatcgttgaatattcgaacagttcacgtactggcaatttgatttgaaagacttcctgtaagcgcgagaccacttgtgtagcaagtagagagtgaccaccaagctcaaagaaagaatcctgaacaccaatgtctcctattcctagcacttgactccacactgaagcgataagttcttccagcggagttcttgggtatacagtattttcagcggattgttcactaagtataggcaatgccttcaaatcaagttttccattcggtgtaagtggtaaaaattccatctcaataaagtttgttggaaccatgtaatttggtaaatgtgtttgtagatgttctcgccattcatggacacttccttcaccaactacataagctactaatctcttatcaccttgattatcctctcgtaccaatacaactgcttctttcacagaagaatgtgcctgcaaaacagcttctatttctcccaattcaatccggaaaccacgaatttttacttggtcatctatacgtccatggaactggagattaccatcagaaagataacttgctttgtctcctgtataatagagacgttctcctgacttgaaaggatgtggaataaatttttcctttgtaagatccggacgattagcatatccacgtgcaagactcttccctccaatatagagatctccaattacgccaattggtactagctgaagatgagaatctaacacataaacttctgtatttgcaatcggtcgaccaatcgatggcgtacctgttgtcactcctacaggtacataacaatctgtggtaacaacggtattttccgatggaccatactgattaattaccgcaaaaggaatatcgttagatgggtactgcgttaattgatccccaccagtaatgataaaacgaagatccgttttatctggccaagataatttcaagagcctttccagaataggcgtaggtgcaaagctagctgttattcgtgaatcaatgagccagtcccttagtgcttctggattaattctcagttcctctgttgacaagtagagtgctgcgccagcagttagatacggccaaatctcctgcacagccgaatcaaaagcaacccctgcaatctgagtcgcacgatcctctgctgaaatatgataaacttcctgatgccaagaaaccatattcattaatgagcgatattcaaccatgacacccttcggttttcctgtagaaccagaggtataaacaatataggctaagttctctggatttatttgacgtgtaggtgcgattacgctttccaccgttaattcttctaacctcaccatttcgacgtgtgcgaaatggccttcttgtccttccgccgtcactacaaattgaatccctgcatcttcaatcatgtattctaaccttgattttggatacaacggatctaaaacgacataagctccaccagcttttaaaatgcctagtaaacttaccattagctcagctgacctcggaagataaacccctaccactgactctggggctactccctttcgctgtaaaacatttgccaactgatttgcttgtgtatccagttcaccataagtccactgttttgtttgatcaactatcgcaatcgcatcaggacgccttgctacttgctcctcaaatttgtcgcaaataagaccctgatgagacatttctattacagtgtcattccatgtttctaataacaaagtacgctcgggttctgatagcatgctcagatcatgcaacggattttgtgggcgatgagaaacttcatgtagccatttctcaaagtgtcctgccatccgttcaatagtagtagcattgaataaatccttattgtactcaaaagtaaaaagtaatccctcttccgtctcaactgccattacacttaaatcaaactttgcaattggactatggctttctatcatttcaatacttctactagataacaccggtaacccttgtttcatattttgcaagatgaacatagtctggaaaattggcgaatgacttgtacttcgctccggttgcacaacttctacaattttttcaaatggaatatcttgatattcatacgccttcaatgccttttgacgaacctgatacagtacatcttgaaatgtcggtctaccactcaaattagctcgataaaccagcgtgttaacgaagaaaccaattagtccttcaatttctctataattccgattcgcaattgggcttccgaccagaatatcttcttgtcccgtataacgagatagaaagctttgatatgcagctaaaagcgtcatgaagagcgtagccccttcttttcgactaagttcattcaatttatcatgtagcgtgcttggcagaaccatagtgtatgtcgacccgtgatgagtttgtattgcgggacgcgggcgatccacaggaagttggagtacaggaagctccccagacaattcttccctccaatattggagttgttgatcaagcacctcctcctttaaccatcctttttgccactgagcaaagtcggcatattgaaccggtaatggttcaagttccgctacctttccatccgttgctttctcataaaatgccatccattcttcaagtaggattcccattgaccatccatctgaaatgatatgatgtagagtacaaaggagtatccattcttcctctcccacgtgcaaaatacttgtcctgattaatggaccctctgttaaatcaaatggtacttctgtttcttgttgaattaaacgtttaacttcttcttcttgatcttcagaagaaagcatagttaaatccgttttcggaattgattgaaaagcatacggttcaatttgctgtacgggttgactattcacctcttgaaagaccgtccgcagtgattcatgacgttctattagttgattccatcccgtttccaatgcttcaagtagccaattccctgtaagacggcataccattggcatattgtaaagggcactattaggtgtaaattgatcaataaaccataaacgttgttgggcataagatagtggaatagcatctcctcgtttcattggtattagtggcggaatctctcgttttttatctcctttacgtaactgttctaatcgctttgccagtgactccaccgttgtatattcaaatagttcacgtactggtaattcgatttgaaaaattctctgtaaacgtgacactacttgagtagctagtagtgaatgaccaccgatttcaaaaaaggaatcctgaacactaatattttttattcctaacacttggctccaaacggaaacgatgagctcctccactggtgttcgtgatgaagtaatatcttcacttatgaactgttcttctaattccaataatgctttccgattcactttaccatttggagtgagtggcataccttcaatttggaaaaagtatgccggaaccatataatgtggtaattgcttcttgagatattcacgccattctccagcatccccttcacccactacataagctactaactgcttatctcctggtcgttcttcctttaccaacacgactgcctcttttacagatgcgtgatcatgtaaagctgcttcaatttctcccaattcaattcggaatcctctaattttaacttggttatctattcttccaatatattctaagttacgatcattcatatatctcaccaagtcacccgttcgatataatcgttccccgtccttaaaaggatgcggaataaaacgttcagcagttaaatccggtcgattgaagtagccacgtgccaatcctactcctccaaggtaaagttcccctgccacaccaatcgggaccacttgttgatattgatctaacacatacaactctgtattatcaatcggacgaccaatcggaataagcattgcttctttttctaaatcacaatcgtaataagtcacatccacagtcgcttcagtaggaccatacaagttaattaactttgtttgctgaacattgtaaaagatccccttaaaccggcgaacctgctcagtgtttaacgcttctccactagtaaaaacttgaattaaagacgatacatcccttttcgaattatatagttccatataatctaagaaagtagataacatcgacggaacaaagtgcatggtggacacgcgatatcgttcaatatactcctcaatcaccgcaggatctttctctcctcctggtggaagtaaacaaacacgtgctcctacaaatgaccaccaaaataattcccatacagaaacatcaaatgaaaacggtgtcttttgtaggattgtatcctcctcggacaatgggtattttctctgcatccactgtaggcggttgataacggaatgatgttcaatcattaccccctttggatttcccgtcgaacccgaagtgtatataatataggctaagttatttgctgttactccacttaccggagctaaattactctctttagaaatcatcacttgatcccggtctaaacaaattgcttgaatatctttaggtaaccagtcctgtagtgcctcttttgttaacagcgcttgaatttgtgaattctccaaaatatatctcaggcggttttcaggataacttgggtccagtgggacataagccccacctgccttcaaaatcccaaagagaccgataatcatatcaggagaacgttcaatacatataccaaccaatgattcaggtccgatacctcgtttttgtagaaaatgtgccaattgattcgatttttcatttagttcttgatacgttagctttccaccctcataaactaccgccactgcatcaggcgtccgtgcaacttgctgctcaaatagctcatgaatcatacaatcatgaccataaactacgtccgtatcattccattcttctaggagttgattttgctcagtatccgatagcattgacagctttgtatatgattcatctggatgatacgtgatttcatttagccagttctcaaaatgtcctgccatacgtgcaatggtactactatcaaataaatccgtgttgtattcaaatgagacgaatagaccttcttccacttcataggcagttaagctcaaatcaaatttagcaatagacatattactttctaccatttcaatacttctatcaggcaaatctagtcgttcttgttttatattctgtagcgtaaacatggtctgaaatataggggaatgactcatgcttcgttcaggttgcacagcttctaccactttttcaaatggtatatcttgatattcgtaagcttttaacgcctttttctttgtttggttcaaaatctcccgaaaagtaggggtgccactcaaatctgatcgataaaccaacgtattaacaaagaaaccaattaatccttctactcccttatggttccgatttgcaatcgggctaccaactagaatatctttttgtcccgtataacgagcaagaaagctctggtatgcggccattaaagtcataaataaagtagatccttcttgtcgacttatatccttcaattgactgagcaatttataaggaaaaatcacatgatgcgcagccccagagtaagtctgcttaaccggtcgaggtcgatccactggcagttgtaagataggaagctcaccagacaattcttcctgccaatacgtaagctgacgatttagcacatcaccttgcaaccaccccttttgccacttcgcaaagtctgcatattgaatagataatgaacttaatttagcaggatttccgcccgtttcttcttcatagaaagcaaggaattcattcatgaatataccaatggaccaagcatcagaaataatatgatgcatcgtacacagtaataaccattcatccttctctaattgaacaagctgattacgaattaaaggaccattcattaaatcaaatggttcttgcgcttctctcgcaattaaactatctacctctttttcttttacttctagaggaagttgagagtaatcccttacaggtaatgctctaggaaggaattcgacaatttgttgcacaggctgttctcctatttctttaaaaacagttcgtaatgattcatgacgttcaatgagtcgattgaatcccttctctaatgcttcaggtatccaatttccttttagatgccatacggttggaatattatataaagaactgtttgggttaaatctgtccataaaccacaaacgttgttgtgcataagacaacgggagtgcttctttattctcctttttttgcatttgcttctgaagccatgctctcttctcaggagaaagtgaactcagctttgcaagtaaatcacttctcatttttttaccccttcctcaatcaaattactctcaaatatcccttgtgcttcttcctctgataactcttctaattgcttaagcagttccagtaattcttcatcattactcacttctgcttctttttgaatataatcttgaaggcttatattctccttactatcattctgcatttcttgatttttgttatcgagcaattgatcaatctgttctgccaattgctgcaccgtatgaaacataaataaatcatgcaatgatatctcgattccaaaagcctctttaagattggaaacagcttgcgtagcaagtaatgaatgtccaccaatttcaaaaaacgaatcttgaattccgatgttttccatgcctaaaacttcatgccatatcgaaacaattgttttttccgtagacgtacgaggagcaatataacaactcgctatctcctgcttctctggtgctggtaaagccttcctatcaatttttccattaggagtgagtggaaatgcatttaatccaacaaaataggatggaatcatataatttggtagttggtccttgagataatcacgccacttttgagcacccccgtctcctacaacataggcaatcaaacgtggatcgccaggataatcttcccgcaccatcacaatagcttcgttaactaatgtatgcttttgtaataccgcttcgatttctcctagttcaatccggaacccacgaattttcacctgatgatcaattcgtccaacatactccaaatttccatccggcaaataccttactagatctccagtccggtatactcgctcgtcttctttaaacggatgcggtataaatcgatttttcgttaagtcagggcgttttaaatatccacgtgctaaccctgatccaccaatgtacaactcaccaactacaccaattggaaccattttttgttcagcactcaatacatatacttctgtattgaagattggtttaccaattggtggtaccctatgcatgacacccttttctaattccatatacgtggaatacgtagtatcttcagacggtccatataagttgaacaccttctcaatcgtacttctctcgtataaatcttgaacaagcggatatggtaacggttctccagccaaattcattacctttactgaagaaggaattgtttttgctcgaaccagttcctttgctgccgatggcacagtattaaccaaagtcacacctttggtagacaacttgtctagatgtagagcattttcagcgacaatcaccttaccacccatcgttaagggaacaaatacttcaaaaacagataaatcaaaagatagtgaagttgaagctaatactcccgctaattcctttcgagaatacgtatgatgcgcccaatgaatcattgttactgtattcctgtgctcaatcattactccctttggatttcccgtggaacctgaagtatagataatataggctaagttatcacccgtcacttcactcgtgcataccgtagtaacttcttgttctatttctgctcgattacgatcaatacaaatgacgttaacgaatgtaggtataaccattttttgttgtaacttttcctgtgtcaccagtacctttatttgagcatcttctaaaatgtactgcagtcgactttccggatacgctggatcaattgggacatatgctcctcccgccttcataattcctaagagaccgacaatcatctcggatgaacgtgtaacgcaaatcccaaccaatgtttcgcatgttacaccatttttttgtaaataatgtgccaactgattcgagcgttcgtccaactctcgatatgttagttcttcatcttcgcacactactgcaattgcttctggtgtttttttcacttgttcttcaaacattgtatgaatcgtactatcttctatatctataacggctgattcattccattcctctagtagttgcttatattccactttcgataacatattcaattctgataataaacattttggataagaggcaatttgatttaaccaatgttcaaaatgatttaccatacgtttaatggttgtatcattaaacaaatcagtattatattcaaaggttagtgataatccttcttccgtctcagaagcaaataaactcaaatcaaatttggcaacagaaacatagctttccatgagttccatttgtctttcggatagctgaagaaactcttgtttcgtattctgtaaagtaaacatagtttggaatattggtgaatgacttgtattccgttcaggttttacggattctaccactttctcaaatgggatgtcctgatactcgtatgcttttagtgctttttttcttatctgcgacaatagttcttggaacgtcggatttccactgaaatcagctcgataaactaacgtatttgcaaagaatcctattaatccctcaatctctttcacatttcgattagcgatggggcttccaactataatgtcgtcctgtcctgtataacgagaaaggaagctttgatacgctgccatcaatgtcataaataaagtgcatccttcttgcaaacttaaatctttgagcttttcctgtaaggaattcgccactattaaggactgacttgcaccacgatgggtttgaactgcaggtcgaggacgatccatcggtaattgtaaaaccggtagttccccagataattcttccttccaatattgaagatgctgattcaaactctcctctttttgccattccttctgccacatgacaaaatctgcatattggatagataactccttcaattccactggttttccggttagtgctccttcataaaaagccatccattcttcaagtaagattcccattgaccatccatctgaaataatatgatgcatcgtacaaatgagaacccattcttccctgtccactttcaatattcgtgttcgaatcagaggaccttgtccaaaatgaaatggttcctccgcctcgttttgaataaggcgtttcatttctctttccctatcttccaaagaaagatctgttagattcgtttgaggaatatgcctgaacacatgagattgaacctgttgaaaaggttcaccctcttgttctagaattgtcgtccttaatgattcatgacgctccaacaattgattccatccgacctccaatgcttcaattgaccatttacctgttaagcgacacgctgcatgaatattgtacatagcactatttggcattaattgatcaataaaccatagacgtttctgcgcataggaaagtgggataacttcttctcgtttcataggtacaagaggagcaacctctcgttttttatcttcttttcgtaactgatccactcgtttcgccaatgcttccactgtatcgtgcttgaaaagttcacgtaatggaattttaatttggaacatttcttgcaatctagagacaatttgagtagcaagtagtgagtgcccaccacgttcaaagaaggaatcctgaatgccaatattttctgttcctaacacttgactccaaaccgaggcaataagctcttccgatggcgtccgaggtagcacatttaaatcttcaatagcttgctcatcaggtgctggcaaggcctttcggtcaattttcccatttggagtaagcgggaagtgttctaaatctataaagtgcgctggaatcatatgatttggtaattgtttttgtaaatactctctccactcctcggtatttccatcgcttattacatatgcaaccaatcgttgatcacctggacgatcttctctaactaatacgacagcctctttaataaacgaacatttttctaaagtcgcttcaatttctcctaattcaatcctaaaaccacgcattttgacttggtggtccattctacctataaattctaaattcccatcagttaaatatcttactgaatctcctgttcgatatagtcgttccccaaatcgatatggatgcgaaacgaatttttcagcagtaagattcggacgatttaagtatccacgtgctaaaccagcaccaccaatatataactcaccctcaattcctattgattgcaagcgttgattttggtctaatacatataattgcgtgttctgtattggctgcccaatagaaacaaattcttgattaggctgaatatcaaatgcattcacataaatagtggcttcagttggcccataaaagttggttaatttcacttgtccactataattccatttctgttgaaatcgtctaaccaaccctgaacttagttcttctccaccagaaaatacatggcgtacggacgaacaattcatattcaattcaatatgattgaagtggtctaagaaaacagataacatcgaaggtacaaattgaactatagtaacctgatgttgtttaatcacttcagctataatagaaggatctttttctccacctggaggtaggaaagatacacttgcaccaacgtgaatgccccaaaacaattcccaaacagagacatcaaatgagaatggcgttttctgcaagaccacatccttttcagaaagcggatatttatgttgcatccattctagataattaattactgaatgatgctcaatcattactccctttggattccctgtagatcctgaagtatacataacatacgctaaattttctcctgttacaccacttatacatggggttgattcttctttttcaattgcagtgtaatctttattcatacaaatcgtttctatattttcagatacaaacaaatttttagaattctcttccgtcactagtacttcgattccagcatcctctaatatatatcgaagtcgactctctggataagtagggtcaagtggaacatacgctgctcctgattttagaatacctaataacgctatcatcatttgtaatgaacgttccatatataccccaactagaaactctgggcctacaccatgcttttgtagataatgagctagctgatttgcacgcttctccaactctttataggtaatttgttcattttcgtaactagccgcgattgcttccggtgtttttttaacttgctcctcaaacatcgtatgaatcatgccttcagccgaataattaaattgagtatgattccattcctctagtaactgtatctgttcttcttctgttaaatgagtaatttcaaatagttttgaatctaggctcttcgtcatctgaattaatatttgcaataagtgattctgaatcagatttattgtttcttcattaaaatagcttcgatcatacatcaactttaaagtaattttcttaccgggcattacaatgagtgttaaaggataatttgtttgttccgtgcttgtaacatctagtaatcttaaatcatcatttctctcaccttgaattggataattttcaaacacatacaaggtatggaataaggagctatttcgcggaacctcactccagccttgaatatctatcaacgaattatactcatactgtcttcgttccatttctttcatttgtattttacgaagccaatctactactgatgtattatccgttaatcgaattctggtaggtaatgtgttaataaatagccccaccatattctctgctcccattaaatcagtaggacgtccagcgctagttacgccaaatacgacgtcactgtcaccgctatacctactcatcaaataagcccatgcaccttgtactaacgtattcaacgttaatcgactatttcgtacccactcttgtaacttctcagtaagtttctcagatacttgataaacacactctccatagcccttctcttgtccttgatcctttctttccattgctaatggcgtaggtgcatagaacccttttaattcttctttccaaaattcctctgcttgactttgatcttgtttatttatccactggatatattttttataaggaagagatttaggaagagtcaataattctccctttatcatcttgagataaacttccatcacttcactaaagaccaatgacacactccatccatctagcaaaatatgatgatgtgtccaaataattctcgtttcctcttttgcttctttgatcgcagtgactctcatcaatggtgcttcatccaataaaaatccttttctacgatctacattcaaaaactgttgtaatttcttcaccctttcctcatgtggataggtgctccaatcctcttgatgaatagtaaaaggaagacgttggtaaaccgcttgtagtggcttttctacttcctcccatacaaatactgaacgtaaaacctcatgtcgattaataacatattcccaagccttttcaaaagtatcaacatccaattgccccccgagcaagaaacctacttgtacaatataggaaaaagaatgttcatcatcttgatcgtataaagtatgaaacagtattcctttttgcaaaggtgataaaccatatatatcaataacgtctcccatttttacaccctcttctttgttaatttaagtaatactttgctcaagctttcttccgtaagatcctctgcatcagcaaaatctgataccgtaaaagcagactctgttgttggtttatttataagttgacgaagatgcctcaacataccatctgctatcacttgaatttttaatttagaaaactgtttcctactatacatccaaataaaatgtaacttttcatctttcaccattccgataacatcaattagatgagatggtttggaatctggagcatgatctaaaaatgtaaatcctgtctcttgcataaacaaagagtcccttgaaaacacctgatcaaattggcccaaatagttaaagcttattgaaggcttttgctgataaaacggaagtaatcctttattcaagtaacgtaaaatgccatagtcaactccgcgatttgggattcgacgcaattgctctttgactgcctttaacccttcaataggtgtctgagttccttgaaaattgagatgaacgggataaatactcgtgaaccagcccactgtccttgataaatcaataccttcaatcatctcttctctcccgtgtccttctagatgaatagaaacggtttgctgatttgtacaatcgacgatagcttgtcctaatgccgttaatagtacctcatcaatccttgtcttatgagtgactagaacttcgtgaaacaatgcttgtgtttcttctattcctaaagtcctcgtcacttgatcaatcgattcttctgtcgtttcttgtattggatagtccattggaattttcatcgtttctttttctacttgttcattccaataatcctttacttcttttgaaatacccgaatcactgtatgtctgaagtcgttcagaccattctttaaaagatgtacttttcgcaggtaagcgaatttcttgaccttgtttcatctggttatataccacctgtaaatcttccaatagaatcctccatgacactccatctactactaaatgatgtatcacccagaatattcgatcattttcagtcaagttatcttcaaagtacactactttcattaacggaccagtaattaaattgaaactagcttgatgaatattcatctcttcttgtattattttattccactctttttcattaacttgattccgttttacaacatggagtactgacagctcatcagtcccttcatttctctgtctccacgttccgtttggtaactgttcgtaccggaaacgtaaagcatcatgatgtttcagtaaatttaatatcgctccctctagtaatttcacatccaatctttcttttactcttaaaagcattgattgattccaatgctctgtatgtggatgttcttgctcgaagaaccagcactgaattggagtaagaggcacatcacctatcacaattccctgctccgcttgtactccctgcgtttctatagccacttgtgccagctcagcgatagttgggcattcaaacatttgctttggagtcagttttaaccccacttgacttgcttgagatatgatttgaatactgagaatcgagtcgccaccaatttcaaagaaattatcatagattcccacctttttaacacctaatactctcttccaaatggtagttagtatttgttcgttactattccgagggccaacacattcactattaatctgcttttcctccggcataggtaaggcctcacgatcaactttaccgttagttgtaagtggaatagcttccatcgccacaaatcccgaaggaaccatataacttggtagtttcgctttaagatattctctccacgcatctacatttccatctcctacaacatatgctactaatcgtttatcgcctggctgatcttctcttacaattacaactgcctcttttacatatgcatatgtatgtaaagtagactcaatttccccaatctcaattcggaaaccacgtattttaacctgatgatcaattcttccatgataatctagattcccatctggcaaatacctcgctaagtctcctgtccggtataatcttgctttcagatcactactaaatggatgagatataaaacgctctgctgttaattcaggtctatttaaatacccacgtgcaagccctgccccgccaatataaagttcaccatcaacacctataggaacaggttgttgataagcgtctagtatatacacttctaaatcgggaatccgctttccaatattacttcttgaaacatgctgcacatcatctaaagtaattggataatatgtaacatgaactgtagtttctgtaattccatacatattaattaactgtggttttttctccccatacctttgaaaccacggtaacaagctagtaggttctaacgcttctccgccaaatatgacataacgcagctgcaaatttttattcttatcttcttgttcacacacttgtattaattgtcgaaatgcggaaggtgtctgatttagaactgtgacttcttcctccaccaataattgataaaaatccttaggtgatcgactaatccagtacggaacaacaactaattttccaccatataataacgctccccaaatttcccatactgagaaatcaaatgcatacgaatgaaaaagcgtccaagtatctttttcattaaactgataccaacaatccgtcgatttaaataaccgaatgacattgtgatgttctatcataacgccctttggatttcccgttgatcccgaagtatagattacatatgccagatttttgggaccgacactagaaaccggcaaagtcttactttctttcccaatctcatcttgatcacgatccaggcaaatcgactcaacattttctggtaaccagttcaattcttttaaactttcttgcgttacgaataactgaatgctagcatcttctaaaatatattgaagtcgttgctctggatatgttggatcaagtgggacataagccccaccagccttcaaaatccctaaaatacctacaatcatctcgtgggaacgttcaacgcacagtccaactaaagtatcaggtcctactccttttttctgcagataatgagctaactggtttgcacgtccattaagctccttataagtaattttttctttttcatacgtaactgcaatagcatttggataaatcatcgcttgccgttcgaacatttcatgaatagttacttgaggcgggacatccagtttaggattgttgaactcaactaaactttttcttttatcttcctcagaaatgatttctatttcagccaccttctgctttgggttttcaaaagtgttttccattatcgctaacatcacgttaaaaaaccgttttatctcttccttagaaaatagctcctcacgataatcaatatgtacatgtaaagagtctatatcaattagattttcaatatgcactgcaaaatcttgtacttcttcacggtttggaatccatagtgagtcaccactttcatcacgatccctataatcaatcgtagttccgaaaagtctcacattactgttattctctttattaatctgctttaataacaaatcaaatggatatttctggtgtcttaatgatttactttgttttctggacaccctactaataaatgaaagtacttcttcttctggatcaatatccattcttaaaggaactgtactcaccatcattccaatcaattttcgttccattttagtcatacggttgccgtaagccattcctaaaccaatatcaaacgatgaggtccaccgatacatggacaacgagaaagcagcaacaaaaagggtgtataaaccaaaattgtaatcttcagaaaatttttctatctttctcttcaaatgctccgttaatataaacgtctcacgtgatgctttggtactaacttggtacgtattataaggcttcaacccggtcatagatggcagtgttttaaattcctctaaccaaaatttttgatctttttgaaaacgactactattcaagtatgtttgttcattggtcagaaattgaacatatgaatttttaatttcgccttcctcattctcgttatgcatgtcataataatattttgcaatctgctcagtaaatatttgaattgataaaccatccataataatatgatgaacatttccaaagactgcacattcattatcgtttaattttattaaagcgaaatagtataaattggaattaaataatgtaaacgtttcttttgttttctgctcaatccattcctcaagcaaatttgtattctccacattactgaaatcaaaaaactcaaattcttgttcttcatgtttaataaaatattgtttcggttcctgatgcccattttcttttaacctaatgcacagaccgtcattttcactgataacgcgattcacaacttggtttaattttgaatagttcattttccgatgaagtttaaataaaaatcttaaattacatattcctttatcagaatgaataacttctgtataccatattcttcgctgcggatggcttaatggataacattcctcattggtcataaaaatcttcccttcaaaaattatttgctcttattggttcgtgtttatgtttagcccataaatatttctgcagtgaaactccaattactccaataataacaagcccaatccctccataaacatagagttgagttactccaaataaatgcactaatgggccactcatagcaggggaaataattaaaactgcgtttgttaaactgctttgtataccaaatactcttcctacttgatcttgatcggattctatttgtaatatgacttgattagatacaagcatcagcccacttccaataccagcgataaaactaattaaataggctaaaacgaagaccgtaccgggcgttatcaaaccaatccccccaaaaccaattcccattaaaaccatacctccacatactacccagccatattgaaattgttttaatttctgagttagtaatgcaccaagtattccgccaagaccaataatagaaatgatatatcccattttacttttatcatgtgggaataaactcttaaataaagttgggaattgtgagtctactaattgtaatactgccatggctattgtaacgaaaatcatggttgataatattatccgattagataacacataaccccacccttgtacccaagcggtccaagtactttgtttttgcttttcaacaaattctttcgatatagtttctttaaattttattgtgggtatgagaactaaggtagctaataaacaacttatagctcttataatgaggcagaactctggttgaaaccaactcagcaacatgccccctataagtgggcctactatctttgtaccctgctctactattccgttgatacttactgctttagtaagcaagtccggggatacaatctgtcttgttagtgtttgctgtgcaggataatagaaaacaataaaaatggaacgaatcattaacgccactaagagccagtggatatcttgtacaaataaaagagcaattgttattagaccaaccattagattacagaacatcataattggaatttttctaaaacgatctgcaataacacctgcccatgagccaaaaataattccaggaagtgcatatgcaacaggaatcaatccaatcatagtaggatctacttcccattcaaacccaactatagtcataatcgctaacatatcaataaaaacaccaagcataagcaatgaataggcagagaaaacttgtaaataaaccctatttcctaataggccttttgaatcaatagttttcataaaagcaagctccttaggttactaatataaacgcttttgcgtataaggtacctctttattaaacttaattaatcattattgacatctcacctagaatttaacttcgtcaaaactcaaactactcttgtttttcatatatttaaaatagtcagacaaacgaaagcgtacctatttcttcatttttatatcaactgttacaaaatatatctttaccttacactaataacagctaaacgtttccttaatataaccctttacagtcgtttgcacattcaattcacatcctttttaaagttggcttttttctatctcaaatactatcacacaaatatttcacctactatattcataaagttgaaatatttgaatcagaaaattcggataaaaaactaaatccacaaatcataccaaacaattatttagttatattgtcattttatagatagctttagccataaggatatcaagaattaagttttttaattttattaacataatagtttatagagactataaatcctactaaacaaaaaaataaatatacaataaagtatatttattttttcttatcctacatattttctatgcaaattaattccaataactaaagttgataataaaaatataatattaccaatcactaatgtactcataacaagaattgaataatatagtattaatacttctgcacctactacctattttatttattggatatttatacttcaaaaaaaattacacatcattcacaattaggatacatacccaaaatatcatttgaacatgttattatattttaagataatataaaatcagtttttctataagagaacttaatttttatgtagtacgaaattgttagtaatacagcatatactaatttagttataaaaacatttaaagaccacctatttccataagtgatctttctttgtgattctgtatttgtgcactactgtagaaatatatcgtagaaacgctttgtttgctaaatgtttagttctttccatttactaaaaaacatagcttcatacacttaatatcatattcgttacattgcaaactattattttgtcttctgtacaggcaaactactaaaaatcaattcagcaacttttacatatccttttgagtttggatgaattaaatccttagaccaaagcgtattgtcattaactaaatgatgattccaaaaatcaacatgatgaagcttatactctctgctcagtgaatgtataacttcatttgcctctaataattgttcttttatttcttgttttttttcagaagcaaaaggaagcctaactgtaaaatcaggaaggtttgctataataatatcagcccctgctttacttaatgtatctatcataaattccatatcgttcttatatgcatcatgattccaacgtccttttaaaacatcgtttgcccctgcaatgagactaaccaaatctggattaaaagttaacgccttttccaattgctgcaagcgaatttcttcagttactaacccacgctttgcaaaattggcatattctatatctttttcacacagttgaacaaaatgatctacccagctttttaatgcaattccctcaacttcatcccctatcccctctgtaaaactatcaccaattgctacaaatcgcttccacatatgtattccccctttatttttaaacatatctatactatacaatagctcacaccgtaattgttatttctaagtggttttcgatttcaattatattccactttactatatttacatttagaatccaaaattgaccgattcccaagtatactaaggaatcggtcatattcgtatatttactaaagaaataaaatccctctaggacttatacttttttcaaaaaatttgttgttctttgttttgcccagttgatacatttcttttcgattacatgatacgaaactatagaaaaaagtagtgtcattgcaatgcacaaagtaagaagaaaaaattacaccctgacattccaagctatccacataagaatctatagtgctttgaaaccttttgtttcaaactaatatttagttgtatcctataaaattagctttttactatatcaatcgtacgatcccacataccactaaaaaaagatcctgttttacgtataaaacgtgtaagccaatttgcttgttccacatcagattttgttacaaggtctatttgtaatgaattacctgataagaacccaggatctgtattatctttagacgagataatcattttactaattgttacaccttttttaataggcgcttcttgttccgtattcgatactttaaattcttttttataaatgtctttattgcccttcggcattggaagtgaaacagcttgcttcgtttgaactactacatctttgtcttttgcatttgccactcgaactgtttcatgtccttttattactgaatcttttccgtagacattcttcacttcaaaattcgcaaatccataatcgtataatttctttgtttcatcaaaacgtgccgtatgagattttgcttttatcactacagaaattaggcgcataccatttctttctactgtaccagtgaaacaatctcccgcttctggagtcgttcctgttttcaaaccatctacaccttcatattgcttaattaaaccttttaacatccagttaaagttcgccatatcaattggatatttaccaccctcttggaatgtttttttaggaatttttgctgtatttaatatttgggggaaatcttgaataagacgttgtgctaaaattgcacaatcccttgcagacattttatttttctcgtctagagttgtcccttctagatgatatccttttaaatcttgatttgttaagccggtagagtttacaaatttatagtctttcataccaaactctttcgacttatcgttcatcatttttacaaaattgacttctttaccagcaatctgttcaactaaagcaattgttgcaccatttgcagagtaaattgccattgcctcatataactcttttaccgtataagagccaccattttctaatggaacatttgatagtgaacgatcttgcgaaatcttatgtgcatattcagagattttaactttttgatcccatttaagttttcctttatccaccgcttcatgaactaagtattcgctcatcatttttgtcatactagcaattgccaatgattcatctgcatttttttcatataaaatttttccggaatttgcttctattaaaattgctgatcctgcttcaacgtctatagcaggaactgtttccgctgctgcttttccaattgtaacgaccatgctacaaaatagtgtaagcactgttactattgcaataactctcttgcaaaacatacctttcacttctgttacctccaatttctttgtactcaaaaaaagcgttattctaacataatcccgcaaaaaatagacagtgttctcaaattatatatacatataaaacgttagaatcgctttcatatagaccacctcatccgacacttttaggtgcgctaatactttgtattcccacacatatccttatttttaatccccttatatttttcaaaatgattcacactttcatattttttaggattacagttaatagacaatctaaataatacatttgttccacatttacaaaaaataaaaaactacaccctatactggatgtagtttttctaactgatttatttatttttcacttcatttttataaaaagcaaataatggttcgatggatggactagataacagcggaattgccttctcaatcaatttcctatcccaatcaaaccaacgcatttccattaacatgtttatttctgtatcagtgaatcgtttctttatttccttagcaggatttccaccaactattgtatacggcggaacatctttacttacgactgatcctgcagcaacaattgcaccttcaccaatagtaacgccaggcattattatagcattcattccaatccaagcatcacttttaatgactgtatctcccttaggttcatatgattgtttaatttgctcagcgaatggatatactgtaatccattctgagtgatgattatgattaccacccattaaaatgactaccccgcttgcaatgcaaacataattcccaataatgagtttgtcaaggtgccatcccatctgttcaattggattgaacagtgcttgggacttagcatctccccacaaataccttacacagccatcttcaaaattttgatgactataatagcctgaataataggagtactctcctacttcaatgagtggatttgttactatatcttttatatactttgtttctgaccaatgattaaataatggatgcttcataactttattcctcgcttctaagtattatatatattgctatttacttagaagcttactacgactgctacattttttagctttctcaaacgacgaatcattatcttcaagcctttcttttatactataaaaaagcataacgcaatacattacaatagtcaaactgtgtaattttgaacacatcttaaacagcgtaatactgcaataaaaacatgaaaacactctaacttcgatacaaataatatattgattacatttagtttatattttgtaaaaaaattttaattgccataacaaagcaaacaataaccactattggtcgtattaatgacgtcccttttgtaagcaccatcttcgctccaatatatgatcctataatttgaccaagcatcataatcaacccaattgtccaatcgatttggccaaaaataataaaatataacaaagcagcgaaattacttgtaaagttcaaaatcttagcatttgcagtcgcccgtgtagcactatatccacataagagaatgaacgctaaagcaatcaagctacctgttcctgggccgaagaaaccatcataaaatcccagtaacggagccactgttaacgcaaacaacaacatacttattttcctcggtcgatcttcgtttgctatatttggagataatagaaaataaatgccaataaaaacaagtaaaaaaggtaatatcataattagatattctgcccgtatctgtaaaacaagccatccaccgaaaactgatccaaaaaaggtcattaagatggacaaacgcatttctttaagattaatttctttcttcttaataaaaaacactgttgccatgagagttccgctactcccttgcagtttattagttgctatcgctacagaaggagacatacctactaataacattatcgggatagttatcataccaccgcctccagcaatcgtatctatccatcctgctaatacagctactaaaaatagtagtatgagtaattcaatagtaaaatccatacaaagaatatgggaaggcttgagctattataccccaaacctccccatcttccctcctctctttaaactagttaattaaatctttaaagtaactttctttctgatcacgtaatcggctggaaacgtattgcctgcaaacaattcttcttccgtatttattatttccaatcgggattttatattcttcctcagataacctttctctaccatgagttacatttgtttgtttaccatagtatgaatttgggataattaataaatcttcagatgtaagtggaaccttataagtaggcgttgttcgtaagagttctaaaaacatgtcaaatttcaatttttcttcttcactttctcctacataaatcaatctattctctgctccatttaaacaagttgcaataatatcaccattatcatctaaaaatataatttggtttatttcccctacaaatcccgatatttcaccatcagccattcctgcgatatgagcaataggcattttacttatcgccaatatgtcatctttactgaagaaattttcttcaagatgcttttgaagtaattttggcgttccaatatgagtttgagtttttaaatttaacactccttttaataaaagagcatcaactctagtaaattttccacaagtaatttcagacactattcgttccacggatttattaagtctatttgatacaatttctaaattcgtattgaatgttttcaatcttgcttcaatatctgattggtctttcatatctgtatacactgtggcatcgttatgttgataaaagttcccgccaccggtgcttgcaccgacatttcgcaaaacttcatcgttatttaaaggcgaaataagatgaaatctatttttcccagcatgttcggatgggtgaattaaagcatcataattaaaaagtgtggcaaaaagccatgtgacccattctgcataaaaatattttttcattctatcgtgttcgtcttcaccataattaaaacctctgcgattttccccaggtaatagtgtttctataggatcacatggagtatttttaataaggataggcggtacgttcccgccacaattcgctatttttatcatatgtagtaggtttttcatatctgaattcggatttttctttgaatagtcaatcaaacaattaagccactcttttgaaaaatatgctgctatttcttgatcacaagtataaggattatgagtttttaattcattttctatcagattcttcattttatccttcaatagattcggaatagtaatttcttcaatttctgtaatctgcagtattcctttattcattataaaacctccgttgttttattttttacaccctatcttcattaaacaaactatccacttcttttttactcctttacttttcgtcagagctattagaattaccgatttacaaataaaaaacatggagtataagagatttgttcttagctacatttcccccacgaacctctattgaattgacaaatttaatttgaaaatctgattcattttcatactttactttcaaactatgtttatatgattttcaattcaagtaagagtatttcattttctaaagttttcctaattttaaaatcagaattttcaatacaactatgttaacattaaaaatataacacgaaaccaaaaaatgtaaatgaatagttttttctaaaaaatagtcagactattcacaaggtaattcgtattccattgaaccaactacggcccctcaattttattgataacaataaaaaagccccctaaattgaagtgacccccgaaagttagacaggtcgtttcattaggcagcctctagggtatttttacaggtctctcatgaaagtaaaaaaattaagtttaaacatactatacgaggagtggatgttatgaaaaactatacaaagcaattcgtcctatcttcttcttttctttttcattttcttaaaaaggaacaaaggcattcgcctttgttccttttttattgcgatctatatagggggaattgttatgaggccatataaacgtgtcttaattaaattaagcggcggtgcacttgccgatcaaactggaaatagctttaactccaaacgattagaacatatcgcaaacgaaattttatccattgttgatttaggtatcgaagtatccatcgtcatcggtggcggtaatatttttagggggcatctagctgaagagtggggaattgatcgcgtagaagctgataatatcggtacactaggtacgatcattaacagcttaatgcttcgcggtgttttaacaagtaaaacaaatagagaagtacgcgttatgacgtccattccatttaatgcagtagctgaaccatacattcgcttacgtgcagtccaccatttagataacggctatatcgttatctttggaggcggaaacgggcaaccgttcgtgacaacagattatccaagtgtacaaagagctattgaaatgaatagcgatgccatattagtcgcaaaacagggtgtcgatggcgtttttacaagtgatccgaagcataacaaatcagcaaaaatgtacagcaaactaaactataatgatgtcgttagacaaaatatacaagtcatggatcaagcggcattactgcttgcccgggactacaatttaccaacgcatgtctttaactttgatgagcctggagtcatgaaaaaaatatgtttaggtgaacatgtggggacgttgattaatgatgatgttacgatgcttgtgcatgaaaagtaatgatttcccaccaaaaaagggtgccttttgtaggcaccctttcctaattcatcatcacaaatagaactcaaccaatcccgccactttctccttacaacgctcccaaaaagataacttttcaaaaaactctttcgtcatttctttcgaatcatgaaaatcctctgttaacgccttattaacttgtcctacaataggaccaccataaatataaaaattcatttcatcatttatattgaagctacgcgaagtaaagtttgttgtaccaataacggttaattcattatcaataagcattaatttgccatggaacattccttttttatacccatatacagtaatcccattattaacagcttgacgtatgtatggatacgccgcttcttttataagaggtagatctggtttatatgaccaaagtatttttactgtaacaccacgcttttgtgctgcgattaaagcattcatggactctttattttttgctataaaatacggcgttgcaattacaatggagtgctgagcttgttttatgagctctatatatttttcagcaacgtaatgcccattgtaactagtcatagtatgtaatgtattccctttactagctttattcgtactcctctttatctcttctttcgtatctcgtttccaatctaaagcgaattgctgttctaaatcttttgctccttctcctttaagccgtacatgataatcacgccaatatccaaatcgcttatctttccctaagtactcatctcctatattaaatccgcctgtatagccaatctccccatcaatcgtcgtaatacggcgatgattacgatggtgaaatgaataaaatccgaatggcaatgcaggttttctactatatgtaaaatgcacaccactttcccgtaattcatttatcatctttctttcaaatgataaatcattaatgcgatcaactgataaatagacgtttactccttcttttgccttctcttttaataagtttaaaaaagtatgactacttttatcatccgacaaaatgaagaaataagtgtagatggagcttttcgcttttttaatatcttcaaatagctgctcatataatgatttcccttctacatataattgaaaatcactataatgaggcgcatactctgtcggcatgttttttccagcttccattttcctacctaaggtaacatcgatatgcatacaaattaaaataaaaacgaaaatagcaataataatagaagtaactcttaatattttttttatcattttggtttccttccaatcatattccttactatttcgtagtgtttcatttaaatatgttttcatacgaaatgtatttcttatttttattgatactgaacagttaaaggagatacgaatatgagaaaaggaaaaactcctattgtttttatcccaggtcttttcggttcaatgagcaatattattattcccggcactggtaattggagttttggactttctgcatttgtttacgaaccattcatcatgatgctagaaagtatggggtacgaacgaaataaagacttgttcatctgtttttatgactggcggcagcgtattgttctttctacacaaaaatatttattacaaacgattgcttatgctaaaaagattacaggttgcgataaactaaatttaatttgtcatagtatgggcggccttcttggacgttcttacgttcaaagtgacgaatataaaaatgatgtgaatcaacttataatactctgcacaccaaacgctggatctccaccaaattatagttattggactggaggcagtctccctatccatgcctcttctaaaataaatatcgttcatttttatatggaacaatatatttgttacttaagcatcttacataaaatcaataaagttgaggcgatacacatttactttccaggattacaagatgttattccttgtaaagattacggaaattatttatttataaaatccgactcttctattacatttcttccttatagtaagatgaaaacgaaaaaccctttcctcgatatattaaatacaaatagatttattatacaaaaaagaaatattgaaacgacactcattgccggagatggagaggaaacaactcaatatttacaagtcgtcccttcacattccaaactgaaatggacagacggcaaagtcgtcggtgatttacttacaaaacatggtgacggtaacgctgttctacatagcgtttttcttctagagggaaataaatatgttttgcatgcttcacataacgaagtgctctacaaaagcattcctatactacaaaagatactctaagtttcaaacaaaaaaggtatggcattaagccacaccttttcacattaaacaaaatttctcgcgtcattatttcttccaaacttataaatagcaattaagaagaatgcaattgcgaaagcgaataaaattaaaatgtttaaatacaactccgagaatggtattccctgctgcagttttgatatcgtatctaacaaccagcgctgcggaagaaaattagctactttttgtactgcacttggcataatgtcatatgggaaataacatccagcaagtaagcatgttggtacaatgatcatattttgcatcgcatttgccgatgctgagtttttcgaaaaagctacaaggactaatgatattccaattgcgattaatgcaaatagcattagtacgcccatcatcactatgaaaggcatattgatattcgtatgaaaaacattcgttaggaataggattgtaatcaaaatttgtactgttagtattatgatatttactccgacattagataatataaacttcttcccatctatcggcgttgataatagtctaaagtacgttctattctctttttcttttaaaatatgacctgataagttcgctgctgaaaacagcataaacataataaggtaacccatcgtttgatttgtcatatctttatttttcgaagtatcttctagcgtctcagttttcattttaaatgaacttttttgataccctgcgtacatattgtcgaatgtgctttgatctgttccggctactttactaatagctgctatattatcaatataattatataaatatgattttataaatcctgttacttgatcacctttaatcgatgaaatttcaatatgctctggtttcccttctcgaacactttttgaaaaaccagaatctaatgtaataactccatcaagttttttggaagtgagtttatcttctatttgagactccttaaccttactcacattcacatgatttaatccttctaaaaactttatcgtatcatttgctatcggctcattttctttatttacaatcccgatatttaacgttccttgccctgcatttccgtatatcgagaaggaaatgagcgtccctattatcggcaagctaattataattagtaaactttttttatttttcaaaagcacagataacgttttttgtatgagccataaaatatccttcatactatagcccctcccgtctacgtaatgcaataattgcaattaataaaaagagtgctgaaattccaatgtttaaagaaatgactggtagtgctgcccctacatcatttgcataaataattttcataacagctgtatttgcccaagttaatggcgataaattcgtaacgaaattttcttctactacgaaatatgcacctccaaaaatagaagctaattgcacaacaaccataataattgccctagacgcttcagctgttttcgtgatatatccgattcctaaaccgaagctaattgctagaaagacttgtgttaataaaataagaaatatgattccaagatggtcgccccaattcgcttgaaaaacaaatttactaaataacatgacgagtaatatgcacagggcatttgctactaggctaccaagtacttttccaatgaatatttcagctttacttataggtgcagcaatgagacgatctcctgttttacgtattcgttctcctcgaattaaagaactcgctcccatcgcagcatacagtgcaatcatcgttgtcattacaaccgcgtagtaatccatagaacctggttttttcgcagcttgtaaagatgtttcttttatataatcattatggtttccgtttgaaataactgtgctcaccttagtaggatctacttttgcaacttcgaccgctacattgtacttatcaacaaatgttgtaagcattccttccacaatactcccctcaatactacttttgtcacttccgtaaaattttgcaccatctttatttaactctacataagcagcatatttatttttcttcacttcttctttcccatctatactgccggaagcttttttaaaatgaatacctgatttatccacttctttcgtaaatgctgcaaatgattgagaaaacgtgctactcgcttcatctttatatagcacttgtatatctttaatcgaatgactatcactattaaatgcgttggttaacgctgttcctaacacaagcataagtacaatcggaaatgctaacataaaaactaaagttcttacgtctctgaaatctcttttaatatgcataattgcaatattgaagatgttcaattgatgaacctccctttaccttttcttcatttaccttttatttatctcgtaagtttcttccggttaacgtaagaaatactgtttctaagtttggagcctgctcctctaacgaacgaatttcaatgtcatgattaatgaaatgctgaataatttgatttaaattatttaatcctgcatccgagtttaccttgattacgttctcttcaatttgaacagctttcacaccgtttatctcttttaacttttctacatctaaattttctactgacttcacttcaatccaaatatctttcgtatctgtaataatcgcttttaactgttctttcgtaccttctgcaatcactttaccatggtcgacaattgcgattttcgtacaaatctcttctacttcttccatgtagtggctcgtgtaaataatagtgcttcccatttcatttaacttccggacagactgaagaatatagtttcttgactgcggatcaattccaactgtcggttcatccataataattaacttcggtctatgtgcaattgcacaagcaatattcaatcttcgtttcatcccgccagaaaagtttttcggataacttttatgtttatcgctaagccccacaaattgcagtgcttcctccactctcgcttttagctcaactcctcttaatccgtacaacccagcaaagaatttcacattttcataggcagttaactcttcataaatcgcaatatcttgcggaacgataccgatattcatcttcgcaaatcggttatgtttctttatattttttcctagtatgctaatttcgccttcattacttcttaacaaaccagcaatcatattaatcgttgtactcttaccagcaccattcgatcctaaaaagccaaatatttctccttctttaatagataaagacatattatcaactgcgatgaaatcaccaaattttttcgttaaatttttaatttctaatgtattcatcatttcacccctatttcggtttctctgcttttagtataaacaaaaagaatgaacctgctcagtgcagaagttcattcttttcacatgagattattcacttttttcatatgagatgattcatcctcatatcggcaacaacattgttactgcaaaaccacttgttccatctacaataatttttccgtttactgacgctgttcgctcctccatccccataatcccgagacctttcttaacgagaaccgcaccttttccgttatccttcacttgtactttcaccatcttgttaagtacatgaatatcaattgagatgactgtcgcatcagcatacttcatcgcgttcgttaatgcctccataacattttcaccaataattttccactgtatcggagaaatcatatctaagttccctttataaacgaaaggaatattcacatcattcttaccggcaaattcctctatgaataatttcatacgatgaataccaatttgctcagttggtggcttcatatttttcaatgtaatgcgaatactttcaattccatcttttgaaatgtgaattgcattttgtaataactccgcagatttttttttatctatttccattaacctctttgctgcctccatttgaataagtgcacccgtcatcgagtgaccaattttatcatgaatttcttgcgataaccgatttctctcttctagcttaaatgtgtattcagattgtcttatgtactctttattttcatgtaagcttttcgtaagtcgttgcatatcttttcgcatcttatcattttgcgattcaagctttactacacgcgatatatatcgatctgcaatagttaaaacgagaaaagaaaatgcaacaattaatccataagtcattcgaatactttcatctgcaatcgtaattgggagcatcataacgacaaagcgtggccaattcttttctatgtaatagaatgtaatttcgtataagttcaaagataaaaacaaaataaaaaatggatgaaccctccatgtaaataacataactacgccaatggatatacagattaatatttttttatacgtatcttttttaaatatagaaatcattacgtttacagaaaggtaaataagtaaagtaaatataacccacggtaaatttgctacatttgcgtaaatataactgaacacaatatataaaaagacaattaatttacttacagttaaccaaaattccatatcattaatctactttccctgttaagtaataaatcgcaatttgtgtgcgatgttcaagtccagttttccctaaaactgacgtaatataatttgcaattgttccctcagatataaaaagctgtttcgaaatttctttatttgagaaaccttttgcaattaatgcgataatactaagctccctttctgtgaaaaggctcttatcaattttacattcttcctctttactttccattaaattagacttaattttatcgaggacaacatcttgcataacagtttgaccgttatatactccttttatcgcatcacgaatacgctccggatcgttattttttaataaataacctttcgctccgttttttactgcatccaaaatatattcatcatcatcaaacgtcgttaaaataagcggttttgttttcgtctcttcacaaatgaacttcgtcgcctctacaccgttcatatttggcatacgaacatctaaaagagcaatatcaacttcatgctttttacaatacgctacagcttcttccccatcatttacagtatctactacttcaaactcttcgtatgtatttaaaataattttcataccttctctaataaaagagttatcatctgctattaatattttaattttcatgtttgttagtatggacctttccctactaacattcacatcctttctccgtgtaacatttcctacttgctcattatatacttctctttaccattttttcacaccttttttcatctagctctcccgcaaaaaatatattattctttttttacaaaatgtgtagggtgacttatcattctttacgtctatataatagaatgcgtcaaaaaggagggagagaccgattgaggaaaaacaattaattgaaaaagcacagcaaggaagcgagcatgcttttcgtatccttgtacaaacatatcgtcattatatttttcaagttatcttttctattttaagacatgaagaagattcgaaagatgttacacaagaagtattcgtaaaaattcacacctctctcccaaattatcaatttcgcggattaaaaacgtggatggcacgtattgccaccaatcacgctattgattataagagaaagaaagctagagaaagtgaagaactctccttatgtaaagaagctgaagaaaatatacagtcctctcataatattgaggctttattattgacgaaagagcaaaaattactcattgctcaaaaactgcgagaacttcccgaaaattaccgtgacgttgttctcgcacattacttagaagaaaagagctatcaagaaattgctttacaggaaaacatcgaagtaaaaacagtcgaaatgaaactgtatcgagcacgaaaatggattaaaaaacattggaaggaggaagagtttctatgatgcattattcaaaagaagattggcgcaattatacattagattttatagaaagtaatgaacgtgaatctatggaagaacatctttatgaatgtgatcattgtttagcactttatatggaaagtattgatgaacaacatgaaaaccttccaatgataaatgatgattcatttacgaacgaagttatgacgcaaattaattttgaaacactacagtctaatgaaaatataaaaacaacctcactaaagcgcacgatcattcattacataattgcgactgcggctacaattatttttatggtaagtggtttatttcagtatatttttacagcgacatcaaatttagagaaatcttcaaaacataacgagtcttctatttcacaacaaattgtaaacaaatcggtagacacatcgaaaaaggacggaggttcaaagcatgaataaaaatccctttttagcacttgtattagggctaattcctgggcttggacatttatacttaaaaaagctaggacggtttattttatatagcgggggatcactatttctattctcctttgcagtattttgtaccatagtagtaagagaacgtgatattgcttttctttctctatttttactagctgttctatgggtaattaacttactagatttagttatcaccattataaaccaaacgaaaaagcaagaagctggagaagtgataaattcctctaaagagagcgaacgattttatatcattctcttatccatcatccctggacttggccatttccaattaggacttatgcaacgcggacttacatttttagtagcttgcacaggaatcggaagtatgatcattttcgttgcacttttaacatcgcaagaaagttttcttatcttccttattacgttacctgttttatggatttataatttctttgacgttgttcagcaactacagaaaaaagaacgtggcgagcaattaattgaccgtactattttcgaagattttgaagagcaccgcgagcagggaaagaaaagtaaaacatttgcttctattttagcgatgttccctggagcaggtcatatgtatttaggcttacaacgccgtggtcttcagcttatggcggccttcttactatctatttatttactcgacttattaagactttctgcgtttttatttttagtaccaatcatttggttctatagcttttttgatgcgttacagcaaacagcaaaatacggaaaagaacgagttcaagacgaacccattatcgattattttatcaatcatcaaagatggatcggtatcgggttaattacactcggtggttattatttattagatcaaacagtccttcctattttgaatgattactttgcaactatatttaacattcatcttagcgagctatattatcgctatttccaaacatctatcgttgcacttctcttaattggcggcggctttaaattgttacttggaaataaagaaaacaaaggtggtacaaaagaatgagaacatggcgtgttggaacattctcaatggggctttctattatatcgttaggatgctttttacttttttcagtcgtaaaaggaattcaagtattagatacactaactgcatggtggccagttttactcatcatacttggagctgaagttttactataccttctattctctaaaaaagagcaatcttttattaaatatgatatttttagtattttctttatcggcgttttaggaagtgtcggaattgctttttactgtttattatcaactggattactagaagaagttcgtcattctattaacacaacgaggcaaacgagtaatattccagacggacaatttgatatacctgaatctatcaaaaaaatcgtagtagatgcaggacatcagcctctaacgatagagggaaataatacaaatcaaattcatcttttgggaacttatgaaatgacaacgaaagcaaatgaaaaactcaatttaaaacgagatgatttcctttcagttcaaacggctggagaaacgatgtatatcactttaaaatcattacctgttcagcatacgttatttaattcagcaccacaggtgaaaccaacgcttgttcttccgcaaaataaaaatgtggaaatccgtgcttcaaataacgaactatctctttatccaggtcaattgcaaaataattggtttgtacaggaaagctcaagagtgtctgtccatcttgcaaaagaaagtgatgtatctttaacagcagtaacgaatcaaaaagaaacccatggaagtacaccttgggaacaagtagaagatttaacgaaaaacgaaaatacttcttcagaagaacatccagaattaaacaaccaagaacattggtataaaaattcgattaaaactggaaatgggacgtacaagttaaatattgagaaagcttataatttgaatatgagtgttctcgaaaaataaaaaaccttccgcaattgcggaaggtttttctcatataatcgctttaattccttctaacactaatccaatcataaatccgcaaaccgccccgttcactcggatccactgtaaatctttaccgacattattttcaatcatttcgattaacgttttatcatctaacttatcaagattttcttgtacaagcttaccgattttcgaatggttcttttccacaagtgtgacaacttgcttttgtaaccacttctctattttttgaacagtttgttcatcttcttttattttattcatttgtttttgtaaaaatggaataacatatttatcagcaaattcttcattatttacaaaagcaactgctctttgctgtacttgctctagcatctcttttattttgtcagtagcattccaattcgcaatccacttttctttccaattttctaattcctgtaataaggcttcattttcttttacattgataatttcttgacgaatcttcgctaatataagttgtcttgtgctattatcagcctcttgtaagctgttaatattactaatgataaacttctgcaaaatgccgccaatcttatcttcatctacaatattcataaatgatttcaaagtaaactgcaagaatccatctacttttatattttccatcgccttcatacctaagctaccgagctggtaacgagcttcatcttgcgctgtccaatcttttaccttcactaatatgtaatcaagtgtcttttcatcatattcttgcactactaattgatcaacaagcacttgtaaaatgttatttgtattaattgtatgtaaatacgtctttaattctttttcaataataaccgctaatttttctgtatcgattgaaacaatcgccttctcagcaatcgttacaatgccttttttcacagcatcagactgcatttctctctctgcaatttgtagcaccatttgtgctagctgcatttcttttactttattcgtaatactttctttcgttagccactcattttctaacgtattgatgagccctttcgttactcgtttacggtttttaggtaacaaagctgtatgcggaattggaattcccatcgggtgacggaataatgctgtaactgcgaaccaatctgcaagcccgccaactaacccagcttcaaatcccccttgtataatctctccagctatcgttccttgaaaagggatagaagccgcaaagcctacacccataaccccaagcgaaatacccgctatatatttagtctgtaatgacatcgtatacacatcctcttattatgtaaaataaagcttttttgttgtatttattcaatattagttatcctttatatatactataaagaactattgtgaaaataacaaagatttttatgtacatgaaaaaatgaggctacaattagcctcatttttcttataccgttaactccaaacctttcctataatattcattcattacatcttttggaaccatacttccacccgttccccacacaatatgagtaccttttttcaccttctctgttaactgttgcttttgtaaatactcatcttctttacatactttcactggccctatcatacctgctagtgcagaaggctctaaataaatattctccgtgtcagctagttcttttaacaatctatataactcttcatcgcttactgtgtaattcccactcaaaaatggttccatcgttttaccgacaaatccagacggtcttcctaccgctagtccgtccgcgtctgttacattatcaatcccgatatcttgaacagcaattttatcatgaagtcctgtcattaaaccgagtaacatgcatggagagtgcgtaggctccgcaaagaagcagtgcacgttgtctttatacaataactttaaaccaaatgctaccccgccaggtcctcctcctactccgcacggaagataaacaaataaaggatgattttcatctactacaacctctaactcttctaattgcttttgtaatcgcaatgctgctactgcgtatcctaaaaataaatcatgggaattttcatcatctacaaaataacagctaggatcggcatctgcttgctgacgcccctcttctactgctttactataatcagcttcatactcaataacgtttacacctttacttcttaataaatcttttttccattgtttcgcatctgctgacatatgaaccgttacgttaaaacctagtttcgcactcataatcccaatgcttagccctaaatttcctgttgaaccgaccgcaattgaatatttggcaaaaaactctctacatgtatcactatctaaaatggaataatcatcttcttctgttaacataccgtgctgcaaagctagttgttcagcatgtttcaacacttcataaatgccgcccctagctttaattgatcctgatatcggaagatgactatcacattttaataataattctcctaaaataggttgcttgtaatttgtctctaaagcttctttcatagaagatattttcactaaaggtgattcgattatgccattcgtccctttcgtttcaggaaaaactttcgcaatatatggtgcaaaacgctttaatctctcttccgcatcttttacattctcttcattaagtggtgaatcttttattgccctttcatacttttctatgtttggatttatccaaaatacttcttctgttgcaataagtttattcactaatgggtattctgcttgtaatgcccctatttctttcattttgtttcctccttatatccttgtagctcaccatataataaattataattaaattaattttaatatagtttaacacaaatcgttaactttagttaattttaatttaatttatttaaatataatttaataacccttaaggagattttcattatggaaaatatagatattggtaaaaaaattgaaaaacaaagaaaagaaaaaggtttaactagtaaagaactagcaaagatggccgatattacaccatctatgttaagtcaaattgagcgtgggtccgctaacccttctattcaaacattaaaagtgcttgctaaagctcttgatgtgccaacatttagctttttacttgaagatacaaatacagacgatttaattgtacgttcccataaacgaaagaaaatgattatcgataatttatcatatgaaatgctttcacctgatttcactggaaatttagcaacagcaattatgaccgtcccgcctaatacagcttcatcagaaaatgtgctagaacataaaggagaagaattagcatttgtcttagatgggaaaatcacattatatttaaacgaggaagaatacgtattagaaactggcgacagtgtaaagatacctgcttatttaaagcataaatgggtgaatcattttgagaaaaatgcgatagtcttattttctgttactccgccgattttttaatatatgtaataaaaaatagccatgtacggggaatatccgttaatggctattttttattttttcggcaccaacaaaatccctaaactaataatacaaaagctcattatttgctgtgctgatagaccaaactgtaccgaattttgttcactaacaagcgaaataatgatttgagcaaacccctcaacaattagaaaaatacttatattctttccatttccgatcctttcatttttcatccataacaagcccattatacaaaggttgaggataatctcatatacaaaaataggatgatacaaaaatttagattcgtatatattcattccccatggtagtgtcgtttgtacacctacttcatgatgtaatagaaaataaaagataatacttacacacagaccaaaaggcaatgcatcaagtaaaatacgaagcgaaaattgttcctttttacttttccaaacaatgtatacactagcaattacgcatcctactacaatatgttgcatacttcctatagctaataatgcttgcaatggcgatttaaaagcccatacaggatttaaaattgctggtgcaaacttccatacaaatacgatgataataaacgcatttgttacggcatccatcattttttcatatgatgcattttgatgcctcatctttcgtttcatcaacataaatccaaatagacttccaattataagagatacgggttgtaatctcacgatccactccatcatcacgaaatccccttttagctctcaatcaatttcttaaatttcttttctaattgatctggtggtaatacacctcgtacatgatctactataattccatccttattaacaaaaaatgtcgtcggtaaagagaatactttataatctagtccagctactccgtccatatctagtagaaccggaaactcaaatccatagcgattagcaaatgcgcttgcttcttgtactgggtcactaacagttgcattcaccgcaaaaatttcaacatcctttttatatttatcatacatatgaactaagtcaggtgcctccatttcacacggcccacaccatgatgcccaaaaattaataatatatggttttcccttggcatcatttaacgactgcaactttccgtctaatccttttaatgtgatgccaggtgctttaaaacctacttgtggtaatacttctttctcttgtaactctgcttgctttgcttttctttccttttcttctttctttgaattataaaagttaacccccgcccaagcgagagcacctactagtataatagcaattagtttcttcacttttcttcctcctcatttttaaaaacctgtaaatccaccgaatagacgaataaagaatgctgtaattttcgtcatttgatttgtatacaataaaatacctgtaatatatgataaataagatatatatagcgataaaaagtataatgatataaatgacaacactctatccacactacatagagtagtgtttaccctaaaaaaaagaggctatatgcactctccgacaataagtacaatcgacacccagaataaccctactgttacatataccgagttcgtatgtaacggaatagtaagcttagcaaccttttcatttaacacttgctcgattcgtaaatttattgctgtttttgcaaatgaagctgtaacacatcgattttccattgtctttattttaattaattttaataacgcgctacctaactcaaatgaagattccattttttgcatcgcatatttatctgctgctaactcttgatacgtatgatatcgttgtaacaattcttttaatatcgggatgtacatcattccttctgctaataacgtaaaacaaaataattttagcggatcccaattattttgatgatattcttcatggaaaataatcgcatcaatctcttcatctgaaaacgtctgaagcaaaccttccgacatgacaactttcggacggaataatccaattgtaaacgctgcaacttccgcagtcggcagtatatatatttgtttcccttttctaataaatgggataagtactttttgtacttttttactatagaaaaattgccgccaaattcttttacacacaatcaatacagtaattaataataaccccgctattataatacgaaccattgatagttctttcatatgtttttctaactgaaacaagcaaaactttgaaaggaagaatgccttattttgaaagagaaatggatatgtaacataatacaataacaagctgaaaaagagggtactaacaatgagcgctaacaatacgattttacgcatttgccatttcatttcatcgatcctctttttttaactgattcaatttgtcttctaatttttttattaaattcggatcagcctgctctaactcatctatcatatgtgttataactaaatctccaaattcccccactaattcctgtgtcattttcttcgtttgattggataagaattcttctttcgtttgtatagcacgatatatgccacttcttttcacagtctgtttttctaagtgtaatttctctactaacctgttcataactgtcataacagtattaaaattcacaggcgattcttcacttaatttctgctggacttctttaatagtaataccttcagtagaccaaataatctccataatcttcgcttcaagcggtccaaagaaatgatttaatccttgctcatttaacctatagttttgcgtaaacatcgtatgactcctttcacactacgaattgtagtacaaattaaatgagaggtcaaacgcaagtaatacaaactaaaattcactacctataaatacgtacatcattctattcattataagcctaacttatctccaaatgtatcaaagagatactgctctaatatttgtacactaaacttttcattacgtccaagtgcaaataattcccgatctttcgctacgatagtatctaacggaataactacattatccactatttttgtaatttcaattatattactttttacatttacttctgttttaaattcaacgttttctaacactatatgtgaacgtcttcctgatgcaaaaaaagtaaaattaggatttttaacaacgccaatttcagtctctaacgcatataaatagtgaaaaattacatctctatgtccatcttttattattttttcatccttctcatcgtctaagtattctttcagcttcgttgtaaattcaaatcgaaaatccacttttttcacgctccttctttgtatttcatattaaacaaatatattgaaataattttaccatattgtaatacaacttcctattaaaagtaaaaactgttttagaaaatcgctattatttccgatacccttttaaaatataagtataaattcaatatgaatgaatgcttcattacatctatttaaacatattttttccattttttgaaacattagtatgaaatattatatatcaatgaatggtttctaatgtattggtatatatagtcggtagtttctttactattccgatatacttaagctacattttctaattattgattacattacggaaggaatgtaactctcttctatcgaatttttatataacaaaaatgattaggtggtgctttactatgaaattagctgtcattggtggcggtgatttacaagattcaaatcacttgcctattaatgaacgccttatagaattaacaaataaacagtatccaaaagtattgtttattccaacggctagtcatgatgatgaaagctatataaaattatttttagacacgtttgaaaaacaattacattgtgaagtacaaattttacgcattacaacagattcaccttctaagtatgaaatagaggagatgattcattcagccgatttaatttatctaggtggcggaaactatattcacatgcttacgcaatggaaagaacatagacttgatgaaaaattattattggctctgcaacaaggaacacttattgctggttatagcgctggtgctatgtgttggttcacgtctagtatccgatcagattatgaaggttctggttacatagagagtaacggatggggtattgttaataaaagattttgtccacattataatcaattaaacagaatgaacgccttccattcctttttacaaaatcatcaagggaatatagaaggaattgcactggaggataattgcgctttatatattacagaggaatcctttgagattatcggtgaaccggaaaaagcgtgggagttttatatgagtgataaaacactcattagacaacattttgatataactttaaaaagctatttgtaaacctgcacttacgaaaaaatgtccctaagtctaataacttagggacatttttctatttaactaactaatcgtgtaattcgtttcttttgccatgaaagcttataatatgcatactgcaatagtaagctgacaataaatgctgctggatacccgatccaaatgccttctattccaagacttgtatggtaagaaagataatatgctacgggtacttctacaagccaaattgaaacaactccaataacagttggccaaagtactgtaccgctcgctcgcattgtcgcactaataatttgtgcatgaccgaaaattaaataactccataacgtaatcataactaagctatgagcaatttcaattgtagtttgactcgttaaaaatagtgataaaatgtctcttgagaataaataaataagagatattaacacaccaccgatgacgtagttcataataattccggccttcacaactttctgcaatcgatcaaattgattcgccccaattgattgtgctgcaaaaatagaaactgtaataccaaggctaactgctggcatttgtacataacttgcaacttgattcacaacgccgtaagcagctgttgcatccgaaccgtaacgatttacaaatgcgattacggcaatctcagataatgaaactaatatcatatttatacttgccggtataccgagccttagcaatagctttaataactccccatccattcgaaggtattttctaaccgtgccatctagttgtaatgggtgatttttcttctttaaatacacaagcaagacaataaacgtaataactgtagatataacagatgcataggctgctccatacacatctaatttcggagctcctaaccatccaaaaataagaactggtaataaaatcatatttagtgctgtacttacaattaaaaagtaaaatggcgttttagaatctcctgtacctctcataaatgttgtatatgcgaaatataaaaataatactggcatcgatataaataaaatccgtgcataatgtacacttatttcaataatattttctggcgttcccattaggcgcataatatccatcgcaaaaatacttcctattatcgccaacacaactccaataataaaggtaaatgtcagcgtcgtaccaacgatagcttttaaacgatcttcgtttttagcaccaaacgcctgaccaattaaaatagagctccctgaaccgataccaattacaaatgaaacgagcaagaaaaataatgggaagaatgctgatatggccgctaaatcattaactccaagccatcttcctactactaccataccaaataattgtccaactgattgtagtacattacttaataataacggtactaaaaacatcgacatcgatttccaaattggtttactctcactttccaacttatgtgactccgcaccttctttattgttatctgcaggtggtttcaaatttcatttctccttttcttaaaaatctattttcaatatctatctctttgtatagttgttataatactgtgcttctattcattttcttttcatatgattataacttcacccaatattgacttccatcggctgttcgatctaaaaatccatattcgattaaatatcttcttaacgttacgaaatcagggtatacattttctatcactgtatttacttctttttcagtatactttttattactatcaaacttcttcactaaatgacgcaatataattaatttacgcttttgtttcttcggaaatttagagagaggtccatctaacccttctgtaaaatgagcttttaatacttcatcattttcttcttccgtaatattgtatcgatcatccaccatcgttgctgttctatgaattggtacaaatttggtttgtacttttgatttttcttctgataattccattagcgctaaaaatacttttgcttgcttcattttctctcgcagtgtaaatcgatgattacgaattgttgatgtacttccgccatccaactcttttacaatttctttatcattcagtcccatatagaaaaactgaaccattttcttttgtaaatccgttaatccagtaaatttcttatccatatttagcaaataatcaaacatagacgtatgctcattttgaatatgcaattggacgaacttctctgcttcatacaaaacttgattatcttgataaataacacctttaataaatgtttcaccacaagctaagcaaatgtacccctctttttcttcattaaacacataccctttctttaattcctctattgacgcatcccaaaacttctctgaaatatcgctcatactaaacactccttcaaaatgtttgtttaaaaaccaaacaaatcgctatatcgtttattattacttcatcatcttatcacaacacaaacaaacatttcaacgtttcgtttgcccattttataaacttttataaaaacatctatcgaaaggatttaatacaacgaaaagcgaatatgtttatacaaattcattttataggatgtaaaatagaacatgaatattcttcaagacccttggtttaccgttaagtaaatggcacagaacgcatatgcgattagtgaatatggaactggtattcactcattacaaaacttcagtattcaattttaactacaaaaaagatgctttcgtataagaaaacatcctttactttttatatattctatttacagtctctactaaaaccttacttgcttgtacaaatgtatgctttcgatttctatcgtcaacaaatttattagcacaactactcataatcatcatacaactaattatgactaacgctatctttctattcttgtaagtcactttatgccactccactattacaaaacttcttttgaatttatcccatcaagaaattttacatgaataataaaacgtgtgaatatgcaattctgcatattcacacgttttatcacaatgttatgatttaatttagttaaagaacaagtataccgaggtgactaacttgaaatttaaagcgaaaaaaaatccattccacgtcattttcattacattatttataattatttttttcgtttcgttattcttccaaaatgaaaattctatttttttcactctcatgatgctgctaaatatcgtgaatctttcttcattctatttctctcactacaacgtaacggaatcatctcttgttgtaaaacacggtttcatttttcatactgaaattccatttgaagatattcgtcacgttaaatactctggtaaaaaacttcattcaaaaaaatggactagacaacaattagaaatccattacaatttatttgactcagtgaccactttcataccactagaagaagaaaaattcatttcactcttaaaagagaactgcccacagatgaaagtaatgaatacgcctgctaacaaataatatattttgaagcttgtagtattgcaagtagatgaaacataaaaatgaacatcaaaaaagccaagattctatactaagaaccctggctttttctattactcttttggagcaatcattttctttggatctacaatttcatcaaattgctcttctgttagtagcccagattgcaatgctgcttcttttaaagttaatccttctttatgagcatgcttcgcaattttcgctgcattttcatatccgatatgtgggtttagcgctgttacaagcattagtgagcgattcacattttcattaattacttcttcatctgcttcaataccaactgcacaattgtcattaaacgaaacaattgcatccgctaataagtgagctgattgtaagaagttataagcaataacaggtttaaatacatttaactcaaagttaccttggctcgcagcaaatccgattgttgcatcattccccattacttgcgctacaaccatcgttaacgcttcactttgcgttggatttactttacctggcataatagagcttcccggttcatttgctggaataataatttctccaagaccactacgtggaccacttgcaagccaacgtacatcgttagcgatcttcattagatccgcagctaatgcttttaatgcaccgtgagtatatacaacttcatcatggctcgttaatgcatggaacttatttggtgcagaaacaaattgtttacctgtaaattgactaatttcctctgataccatctcaccaaatttaggatgagcattaatacctgttccaaccgcagttccaccaattgctaactctttcatatatgtattgctctctgcaatcatacgctctgttttttcaagcatacggtgccatccgctaatttcttgccctaaagttaacggcgttgcatcttgtaaatgtgtacgaccaatttttataatatgttcaaatgcagttactttttctgctaaagtttcttttaatttcgtaattgctggtaatacgtgattttctactgcgattacacaagctacatgaagcgccgttggaaatgtatcatttgaactttgtgacatgttcacatcatcattcggatgaatatgtacgtcagatcccttctctttcaaaatttgattcccacgatttgcaattacttcattcacattcatgtttgactgtgtaccactacctgtttgccatacgacaagcggaaaatgttcattccatttccctgcaatcacttcatccgcagcttctacaattgcttctgctttttcttctgatagctttcctaatttttgattgctaagcgctgcactcttctttaaaattgcaaatgcttttacaatttcaagcggcatttgctctgttccaattggaaagttttctttactacgttgtgtttgtgctgcccataatttatcagctggaacttttatttctcctaatgtatctctttcaattctgtactccatgttttcatccccttgaaaatataatacctacatctcttataataacagactttctcttaaatgataagaattctcactcttatatatagatattctatatttatttaaaaaaattcctcttgacctaaacttaagtttaggctgtatcctttccattgtaacctactataacattactggaggaattcaatatgaaaaaatatgcttttataacaggtgcgaataaaggaattggatatgaacttgttcgtcaattagcagaaaaagattatcacgtatttttaggtgctcgtaatgaacaacttggacaacaagccgtagaatctttaaatgtttcaaacgtttcctatattcaagtagatatttcaaattcacaatccattcaagaagcaacaaagaaaatttacgaaacgactgatcacttacatttattaattaataatgcaggcatagcgctagacttcaatatgctacctagtgaattaaatattgaaactttacgccaaggatttgaagttaatttttttggaactttccaaatgatgcaagcctttttgccattattaaagaattcaagcaacagtaaaataataaatgtaacaactgacatggcctcactaacaatgtttgctaatggtgaaacacatccaattaatacactaggatataattcttcaaaaacagctattaatgctttaacattagcttttagtaaagaatttgccactaacggtccagaagtatttggggtaactcctggttttacaactacggatcttaatggaaattcccccggtggccatacaaccactgaaagtgctaaaattattattaaatatgcattaagtgaaacaaactataatggtaaaatacttaacaaagatggcattataccttggtaataaaaggatgaatgatatgtattatacaattgggcaagtcgccaaaatgcaacacttaactatttctcaaatacgttattacgataaacaaggactgtttccttttctgcaaagaaacgaaaaaggagatcgagtttttgatgaagaagcactgaaatatttagagatgattttgtgtttaaaaaacactggtatgccaattcaaaaaataaaacaatttatcgactggtctatggaaggagaatctaccatccttcaaaggttagaattaatgaaacaacaggagaccaatgtcttacagctcattcaagacactgaaaaaaacttaaaaaagatacaacaaaaaattgctaaatatgagaatgaaataacttcagcaaatgctattaaaaaataaaaaaatcaccttctacatattgtagaaggtgatttttattttatgatgcttgctttcctttatctgcatcatctacataccagatgaatttgcctgtatatccgtaaataactgctaaaattaacgatacgaagcttaaccacataaacggaacgtatgagaacgttgctacacctaaaataccagccataaaaataccattatcagaccatggaaccatacctgaagttaacgttccacctacttctgagttacgcgctaatacacgacggtctatttttaatttatcatagctatcttccataatttttggtgttaaaattagtgatacatacatcgcacaaccaaatatattagctaagaatgccacgattaatgtagacaatgttacattacctgcagaatttaatttcttctcaaattttgatacgattacttttaaaacacctagtttttcaagtaatccaccaaatcctaaaccgaaaataataacggctactgagccaagcatgccgttaattccaccacggtttaataacttgtcaacaaactcaacaccagattgaattgagaatccgttataagctgttccaatcgcctctccaaagttcatcccttggaaaagggttgcccaaattgcaccaattaaagctcccattgcaattgttggcatagacggtttcttcatcgctaatagaacgataacaatgaccgccggaacaagcatccatattttaatatcaaattgctttaataaagcttcttttaaaaattctactcgattcaaatctacattatcgccgccatacatccaaccagctacagtaaacataatactagtaataatataagctggaacatctaatacgagcatagctcgaacgtgagcaataacatctactttcgccatagaagctgcaagaactgtgctatcagaaagtggtgataatttgtcgccgaaataagctcctgaaagaactgcaccagcaacaagcggaagtggtaaaccaagtccttcaccaatcgccatcatagcaatacctgctgttcccactgttccccaagacgttcctgttgcgatagaagttatagaacaaataattaatgttgctaataggaatatgctagggtgaataaattctaatccataatagattaatgttggtactaccccaccagcaatccatgttccaattaaagcacctactgcaactaaaatcagtatcgcttctaatccgttagaaatccctttcgtaattgcatcttgcaattcttgataacgaaatcctaatcttaatccaagcgcaattactaaaaaccatgaaataaatagcgctaattgaattgggagatcaaaaatcgtttggaaggaaaagacaacagcaagaaatagtaataaaagaactatgatttctagcatcgatggtaatcttacacttttcatttttttctctccttacaagtcgataacatgacgtatgtcgtcttacatgtatgtaatatacaattagcgaagacaaaacaaaattttcatattatttcgatttatttttccagtataatatattcacaaccctttctattgtaaaagtagattacgtttttcgcaatgaaaaatataaaaaatgttgtatttttatttatcccgatattttcggccaataagacccccgtctcaaaattcagtaagtgcaaagcacttaggtaagaaattaaatactgtaaaattccaaattgatatgaacgtattaaagcttcactttatttacaaagaaaaatcccatactaacttttttaatatttgctgcaataaaactttttacaactatcttcgctttttaattcacaccattattttctacataaaaaatagggcacacatcataaaaatgatgtatgccctatctttatttatacatattttgtatttcttctttatttttaagtatttcctcaaacttatcactacaacccttcggaaataacactcccagtccatatgaatgcgcaaattgaaaatgagggtacttcgcttttacctcatcccaaaacttatatacgccgaaatcactacttctaacttcaatatcatgaaataatacaataccgtttttcgcgactttcggtagccatgtattataatcgtgagaaacagcttcatacgtatgatagccatcaatatgcaaaagatttatcgtttcatcttgaaaccggtctacagcatcatcaaaagtagatcgaattaaatttcctatattaaggtagttatcgctcactactttttctactatttgaaaaaccccttctccatatggacctgtatgcccatctccagcccaagtatctactgcaaagcatttagtcgataaccctccatcttttactccctgacaaaaactaaaaaaggaagctcctaaatgtgtacctaactcaactaaagtttctggtttttcaaatcgtactaagtcatatgcaaaatctaaatgtccactccacgcagattgtgaccgaataataggactaaatgtttcaaattcaaatgatggtttatgagtaacccagttcatcgcataactccttctgcacatatttttaacaaaccaaattactcttatctttatttttttatcgccttgattatgattctatttcatgaaaatatgaagaatttattcttttctattgaggtaaagcatcatatacatatgggtcagttggcttattaattttttcgattttgtttacttttacaagtggaaagactgttcctttatatgtcgtttcatctaataatcctgttatttttacccatgtttcttctggaattttttcaatatttttcccggtaacaatcatcccccagactgatgcatccgcaatacaacaagttatgccatatcgagccactactgctttattccccgtcacatctttatccttatatataaaccctaagaatgtaatttctttccctttaaaccaattaacattttgaccaattacattcattgtttgaacataatccttatcctttacttgtagtttacgctgtcctaacatactttttactacttgctcttccgttttataagtcgttgctaaatttgatgtttcttctgaatcaactgatacttctcgctcatcaaacttaacctgtttcccctctttttcgtttctttccagacttctcgcctgtacactttgattcatacccctttttcctcctaaacttccatcaattgttacacttccaaagagaaaagcactaactatcggaacaacaaataaaacatatacaaagaaactttttatccctgattttgatgttgtatgatgtttacaacaattgcaatcatgctgtttttctcttccatctccccaaacttgtacaataccaaaaattaaaattactacaaaagctatatacgtaaatttgatcatttttggagcgataaaattataaatattccctgttacaagtagtttaaataagagcattgctaaaccaattaaaataatgccacgaatatagcgatgatatgccttctgctcctctttctccattctttctccattctttctcacctcctataacattatgatttgcacgatggtatacacagatacaatgacaattcccatcaaaaagaatacaaatctcttttgaaaatacgcaaatagcattaacgtatttttcatatcaagcataggcccaaacacaagaaatgcgagaagtgcctttatcgagaaaacatgtccaaaagacgcagctataaaagcatcggctgcagagcaaattgataaaacataaccaaaccccatcataataatgggagcaattacttcgttatgtgctactgcatccagtacattccgatcaaaaaacgtttgaaatacacttgctaaaaaagcaccaatcaataaatacttaccagtatcaaaaaactcatctacagtgtgattcataacatctttccaactcttttttttgcttatttgaactgaaacctctacgtcttttaaaacatttctttcgcgatagcaataatacacaattagacctatgaatagagcaactagaattgttatcccaaagcgtgcatatacaacgtaatcattttttggaaacgcatatacagtagataaaagaacaactggattcataatgggtgcactcaataaaataacaatgcctacatgaagtggtagccccttttgaatgagccttcttacaattggtataatgacacattcacacattggaaaaagaactcccacaaatactgctggaatcattgcaacaattggagatttcggcattactttttgaatcatatcttccgtcacaaacacttgaatacatgaagaaacaattacccctaataaaataaaaggtattgcttcaaaaatgatacttaaaaataccgtattcacattcagccattcctgcggtatatttgtgtgcaaatttactagacttgtaaaatctacaaaaaataataaaaagagaaacatagcgataagagctatgcctactaattcttttgaaactctattaaagaccaagcttctcgcctccattttatttacatgtaaacatgtgcttgtccaaatgcttcatactacagcacaaattttatagtctatttctattcttaaatcgtaatcattatgatttattattgatttttcttttcttatcgtttaatataaaacgtaatcattacgatttaaaggagagatcatttcatgaaaaaagtacctatcactgtattaagtggttttttaggatctggaaaaactaccttactacatcacattttgactaataagaataacttaaaagtagctgttatcgttaatgatatgagcgaagtaaacattgatgcatctcttataaaaaagggtggtttttcacgtacggaggaaaaactagtagagattcacaatggctgtatttgttgtacactacgagaagatttaatgatagaagtgaatcgtcttgtggaaaatggtgatattgactatattattattgaatcttctggtataagtgagcctattccagttgctcaaacgtttacttatacagacgaagtccttaacattgatttaacgaaaaattgtcgcctcgatacgatggttacagttgtagatgcaaatagattttgggatgattttgcagatggagaaagtttattagaccgaaaacaagcaatcgatgagaatgatacccgagaagttattgatttattaatagatcaaattgaatttgcaaacgtaattattcttaataagatagatttgctagaaaaagaagatgtgatagagcttcatcatttactaaaaaaattaaatcctaatgcaaaagttcttgaatcttcgtttagcaaagtaccattacaagaaattttaaacacaaatctatttaattatgaagaagccagtcaatcggccggctggatacaagaattaaatagtgaccatcatacaccggaaacggaagaatacggtatcaattcctttgtttaccgccgcaaatatcctttccatcccgagcgccttatgaattggctagaaagatggcctttagatgttgtaagagcgaaaggattcttctggctggcatctcgtaataatatgatagggcttctatctcaagcaggttcctctattacaattcaaggagccggtgagtggatagcggcattacctgaaactgaaagaaatcaaatgattacagaagaaccagaagtattgaaaaactgggataaacaatatggagatcgaataaccgaactcgtatttattggaattgatatgaaccgttcgttaattgaacaatcattagatgattgtctattaacagaaaaagaaatgcaacaaaactggaatacatttattgatcctatcccggcttttacttatacttcataacaattaataaaaggcttcagtagaatgaagcctttttactttatagtactcttatttaataagtttgctttaattatgaatacaattgtacctaaaacaattaatatagcatatacgataccaactaaattacctatttcttccaatccaagcggtaatattatagtagcaactccaactatataagaaaatgctcctgaaagcttcgctaatttatttttatctccaacaaacgtttcttcttgatatcctgctaacaaaaacaacctctttttcacatgtatttgataccctaaaaaaatgataagtaaccctacaaataaacaaactaaaaatccagctaacatatactccccctcctctacaatattttactatacataaaaaacaaattagaaatttcagtttattaatgagtcattctgtgatatattgcatattgtattcaatttgtatttttagaaaggagaattttagatcatatggattcaaatcgattaaaaggaattataatggtcataatcggtgcttgtttatggggcttgtctggtacagctgcacaacaactttttcaatatgacaatgtttcaaccgaatggttagttacgatccgtttacttatatctggaattattttgctcattatttcctcattcggaacgagaaaaaaagagatatttagcatttggaaacaaaaatctgatgctattaaaatgattttgtttggtctattcggtatgcttgctgtacagtatacgtatttcgcttcaattaaagaaggaaatgctgccgtcgcaacattattacaatatttagctcctatattcatcactgtatacttacttttcaaatggaacgttcgtctatcaaaaattgatttcatttcaattaccctttcattagtaggcacttttctcttactaacaaacgggtctgttcataacttggctgtttctacaccagctattatttgggggattttatctggattatctctcgctttttatagtttatattcaaaggaattgttagaaaaatggtcttcttccgttatcgttggatggggcatgattattgggggtattggtgtaacgattgtacactttatttctacaaacgaattcattttattatcaactatgaaatatgtaaaactaagtaccctaccgctcatcacatttgtcgtcattttcgggacacttattgccttttatttatacttagacagcatacgatacctgactccgaaagaaacaacattatttggttgcacagagccactcgcagctattatttcttctgtacttatattacacgtgccatttcaatcttttcagttattaggcgctttttgtgtcattgtaatggtgctcatcttaagccaaaagccggatgaagggaaacaaaaattaaagcttgttcatgcaaaaaaggaaaatatacaatgaaaggattgaattcactatgcctgtccctcaaaattataaaaaaccaggaagagtttcagcaaaatcactcgttttaaatcaactacaaaattggattattgaaggtgtactgaagcccaatgaaaaaattaataatggggaattggctgaggcactaggagtaagcagaacacctgtaagagaagcacttcaaatattagagctttctggattagtggaaatggtaccagggcaaaaaacgaaaattgctcctattaagttagacgacgtatctatcatttatgaaacgatggctggtcttcactctattataggaaagcaagctcttcaaaacattacaaacgctgatattcaactactttctgaaataaatgagcattttcagcaatctatagagaaaaaaaacgcaaaacaagctttagaattagatatacaattccacaatacaatttcttctattgctaaaaaccaatatattgaaccctttctagaaaatatgcaacttcacgttttacgtcttgaatatttgtttttccaaaactttgttccagcaagtcaatctattgaagaacatcactctatcattcaagcattacagaagcaggacgaaaaacaaatggaacaaataatgacccaaaactggctccgtcccatgaaagaaatacaaaaaataatttctacgaaataaaaagagagctggttacacaaaatcgtaaccagctctctttttactaatctatatagctacgcctgaatattcgcataatcttccatatcttcgtactctttttccaattcctctaaagacagctcgtataattgtcggtcgcgaatcttaaacacacctgctccaattaactcatcaattaaatgcctcttacgattttcaacagcaaaacggagttgactactcatcttttaaaaaactcctttctacgatcattgaaaatgataatctctatcaattaccacttttgattataaaagatgactctttataagtaaagtaatttcatgaaatatttaccttgcaaagtacttgtggccacattatatatatgtatgccgtgcgaaaaatgttatgacactttttcttatcctttttctttcatactttgcaagttgtctcatcatgattaaattcaccatctatttctacttgaatggtgacatgttctacatgaaatttctcctttaatacatacgtagcctcttttaatacactttgcgtttcattccctttaataataagatgacatgttaatacttgaaaatctgatgtgacagaccatatgtgcaaatcatgaacttctttgacaatcggaatatttaataacgtactttttacctcttcaacatttatgtgctgtggtgcaccttccattaatatatgaaccgtatcacgtgttacacgccatccactaataatgactaaaatagacacaagaatactagcaatcgcatctgcagcagtccatccgaaaaatttaataagtaacgcagcaataatcgctccgacggaacccaatagatcgcctagtacgtgcaggaaagcacttcttaaattcaaattacctttcacatctccgcctctcattaatatccaagctgataaaatattaataagcagaccaaggactgcaataatgagcatcccattactagcaatctcaactggttctttaaaacgacggattgcttcaataaaaatgtataccgaaatgacaataagaacgacaccgttacataatgctgctaacatttcgactcgcttatacccgtatgttttcgcagttgttgctgttttttctccgagtttaaacgcaagtaaacttaaagctaaagatactgcatcacttagcatatgccccgcgtcagatagtagtgctaagctatttgttacaaatccaccaacaacttctgcaatcataaaacttgttgttagtaggaaggcaattagtaacgcctttttattttttgaatgaccatgatcatgcgaatgtcccatacttatactcctttaagtacaatatctgtatgttagtatgaaacaaactccccatctttatcccgaattgactgattgtaaacgcccgcttcctctgtatacacacttcgctattttttaaacaatccctttttctcaaataaaacaagactacttcttttttattttcatattgtttactaatgaaagaatttttaaggaggttacttaaatgaaacgtttatttctctgtatggaacgtgaacttgttgtagtgaaagaacacaatgataactatgaaacgacttatcacttacaaaatatgcaacctacctgtatcgctgttgatccatttcaaaagaatcgtgtatattgcggaacatttggacgaggtctatggttaagtgacgatagtggggattcatggagaccaattggagattcttatcgttactttgatttccctaaagaagatggtattttgcactcctctatcacttccataacaataagctcaaatgaacaagttaacggatatggtgtcgtttatgtcggcacagaaccgagcgctttatttcgctctgaaaatggtggtgaaacgtggactgaacttaaaaatatgaaatcattattatcttcttatacgtgggcatttccgcctagaccttttacccatcacgtacgctggattacagttgacccaaataaccctaatacaatacacgtttcaatcgaagctggtgctgttattcaaagtaacgataaagggcatacatggattgataaaaaattcggtgctcctatcgatgctcatcaattacttatgcaccctaaagcaccaaatcgcctttatgcatcatgtggtgacggatttatgggcggacctgatcgtgcttatcttgagagttataacaatggaaacagttggatctcatgtagtgcaggacttgaacatcattatttatacagcatggctatcgatccagctgattgtgatacgattctcgtttctgctgcgccaagtgctgatctcgctcatcatcgtatcccttatgaatcttatatttatcgaaaaacgaaagatactccgttccagcaagtacaacaaggactaccatctgcaatcggtacagtcatttcgatgtttgcgacaaacgaagccgaaccacatacgttctacacgttaaataacaatggcgtctttcaatccaatgatagcggcgaatcgtgggaacaactaaacattccgtggaaagatgagtataaaacgcagcatccgcatgcactattcgtcactagttcttaacgaaaaaagactgcctaaatgattttagacagtctctcttttatttctttaaatcaatgacaatatcatctaacacaatatctttgctcttcgcttcttttttcggcacttctattttcttctctttcccattcacatactctactccaccatgattttcaggtgtatgtactcgcaagtgcacgcgaggtgtaacgataagctttgttgcattttcgtttagtttttggaaggtggcactccaatggatattgtaaggatcgttgccacttcccccatttccttcacccgaataaatattccctaaatcatccttaaccgtcaattcaacatctacactatcccattctttcctcgcgcccttagaaacctcttgattgtaataaagaataaatgaaactggcgatattgcgaccttttccatatttgcttttataccttctttttccgaactcccaccaattgttctctctttactatccactgattttacagttaacgcgaaattccaattaccttgtattgattttttcctatctggcatctctattctctctatattccatctaaagtttactttgtcctttttattgctatcatgatgcgtcgttgttaccatacctacatactttttttcagtaactttagtcattttaccactgcctgaactaccatgagcgtccattatatccaatccacctaatatgataggatcctcccctaagtcctgctcactttccagtgaatacgttatagataatgttctgccatcagaaattacatcattaattgtaaccttaaccccattactctcttttgtcatattcaactcagtcgaaaattccttataattttcatataaccccgttctaccattatctaaaaatcggaatatgtcacctacaattggcaatcctccagcatatgtaggaaaaccgataccaagagttgcaaccgataatcctactaaaatagatgcagcagcgacacccttcttcctacttgtcatctttttcttcgtacgtatcgattgttttacatttcgttttactttttccttttcaatttcagaagcctcaatttcttctagttctttttcatctatatcaatatcatttaatagttcataaatgtctttcatattgcactacctccaaaactaatattcgtagcattttgttgtagtttctttttcccccggtacactcgattatcaattgctgcccgagttaatcctaacttgtcacctatttcctctgtcttcataccaagtaaatatttcataatgaacaccttttgatctagcggttctaattgattaatgagcttcaataattcttccctatcttccataacgattaattcgtcttctgctgatttttctgtactgatatgaaactcatctgaaatgatttctactgttttagtcgatttccggtaataatcaattgctttaaacttcgcaatcgctgcaatccactttttaaaatcactcggctctccatggaatttatttgcgttattccaaatggaaagaaatatatcgtttatacattcctctatgagtccatcattttgaatgggaagtagaactttatgcgtgatcccctttatgagtggtaagtatgtatcgacaacgaattctaacgcgtcttctttttgccgctgtaatctttttataaaatttttctcatttgatttcatgtagcgattccccttattgttttgtaaaagcttttacaccctatataacgtctgagaaaattttttctctcatcttttttattttttgtatgtaatggaatactttcccttagccattttctcacataactatgcattcaaagaaaactttctcaagtctgtaatttaattcatgtagtacactatttatatagtcactctttaatttagtgtacattttatttcattaatctattttaaaaattaggagatgagatgtgtatgtgtggaattacaggttgggtagattggaaagaagacctttcaaatcaacatgttattttaaaaaagatggcaaatagtattgagcatcgtggtccggatgctgaaggattttggttttcacctcatgcggcctttgcacaccggcgtttaattgtaattgatccagaaggcgggacacagcctaagacatttcgtgctggtgattatacgtatgctcttacttataatggagaaatttataatttccgtgaactgagagagcagcttcaaaaatgtgggcatgcatttgaaacccattcagatacagaagtattactacatgcttatttagaatggaaagaagactgcgtacgacatttaaacggaattttcgcttttgccttatgggatgatcagaagcaacaattgtttttagcacgagatcatttaggtgtaaaaccactcttttttacagaaagaaatggcagtattattttcggctctgaaattaaagcattattagcgcatccatctgtccctgctgaaattgatgcgaatggaataaatgaaatatttggattaggcttatttcgcactccaggatgtggcgtctttaaacatattcaagaagtacgtgctggacattctataacatttacacgtcataaaaaagtagttactaagtattggaatttagaaagtaagttccatacagactctatagaagatacatcttcgcatattttatctattttacaagatacagtaaaaagacaattaattgccgatgttcctctcgtttgtatgttatcaggcggattagactctagcggtattactgcacttgcgggtaaagaatttgctgctgaaaataaaacacttcatacgtattctgttgactttgtaaatagcgcaaaagatttcgaactgacatttgctcgcactggtttagacactccttgggtaaaacgcgtttctgaacatgtcgggacagcgcatcatgatattattgtgaatgctgaagaattagcaaatcacttattcgttccccttcatgcaaaagatttaccgagtgctggtgaaatggaaacttcactatatttactattttgcgaaatgaaaaaagatgcgaccgtagctttatccggcgaatcggctgatgaagtattcggtggatatccttggtttcatcaagaagaactactatatgtagataagtttccttggctaacaaattggaaaaatacatctcctcttctactaaatgaagtaagtaaccaatgtaatctagaagactatattgatacacgattccaagaagcgatacttgaagtacctactcttgaaggcgaaagtaaaaaatccgcgaaacaacgtcaaatgttttatttatttttaacaagattccttcctttcttacttgaccgtaaagatcgtatgagtatggctgttggatttgaagttcgtgtaccgttttgcgattatagattagttgaatatttatggaatgttcctttcaacataaaaagtattgataatattgaaaaaggcattttacgtagagcactacaaccagctttacctgacgatgtacgcaatagaagaaaaagcgcttatccaacttcacaagatccacactacttacaaacaatccgtaatttaacacttgatatgtgtaacaataaaaacaatcctattttctcacttattaaccattccatcttactttcaattgctgatcaaagtaataaagtgattaacaattttgaagcaagaagtgccatggagtatatgctacaagtaaatgaatggttgaaaacatatcacatccatattgcttaacaaaaaggagttcaaggataaaaaccttgaactccttttatattaattagcacattgtttattatcagtatcaatagaccatccaataatcgtggcacagtctctacctttccactgtagtacatttgttaatacgggctcaatctgcaagcgagttccgtcgtgtaatatttctactaaagattgatcatcatcaaaccttcgtttgtcacactctaaaataccgtccgttgccattacaatgtgattcattcctttttctaatcctcttacacctgacgtaaagcaaggtgtatttgctgcaaaaatatttttcctgccaatatattcgtaatttttccgtttatttaatcgtccttttccatttttcgttttctcagaatggaataaatacgcgaaacaatcaccaactgataaccaatataaaaattcgccttttcgtaaacaaattaagcaagcgagttcctcatcatcttgatcacactttttaataaataactcatctgtaaataacgctaataagtacatatgtgtatgatgaaaagctaaatgtattggataggaaaataactcttttaatttctcttttctttctgaaatcgcttctattatataatcaatattttttgttttgtggtgtgtatcaaaaatcataacaaattcaaattgtaattcagggtcccaccaagcaagtaccgcatctcctcgttcatatgcatcactttcttgatttcccccatatacgccgactgaaagaggaccacatttttcaacatgtatttcatctacatacatctgttcatgactcatccatttgaatgtattcacaactatcatcctctctcttgctaaatgtatacctttacacatagattaccttatatttcaataaaaataaactttttcaacattttttatccaaataaaaggattttatttctaaaacaacgaatatatcttactatacgatataaaaaaggggatttattattatgaacaacattaatcaacattgggagagcatttattatcacttacgatacgaatacgaggacaatctttcccaccaagcaattcgtattttacaaatcgtttctcgtgagaaagatataacaattggaaaagtcgctactgagcttagcctttctcataacacagcatctgaacatataaagcgccttattcaaaagggtttcatcgttaaagagagaaataaaaaagatgaaagagtggtaaaccttacattaacaattgaaggaattgaagtattagaaaaacatactttactagataaagaaaagataaaaatattagaatcacagttatcaaaagaagaactacaattaattgaaaaagcattttcgttattagcgaaggaggcaaaatatgcatttcctcgttaaagtaatcgtttcggcacttattatcggcgttatcactgaagtcgccaaacattatagtacgataggtggctttattgctgctcttcctctcgtaagtttacttagtctattttggatttcatttgaaggcgggaataaacaagaattgagtcaatttgctttaggggtattatatggattccccgcatcagcactactattatttattgtctatattggtttaaaaaattcatttacacttagtacatctgtcctactcggtataggtgtttggtgtatcgtttttgcttttcaaaaattatttcaagcttagggggaattaacattcataaatttgtagaaataatggggcaaaatatagaagtacatataaaagaccaactatgagaagtcaaggggagttttttatataaatagggggtgttttataccctagaggctgcctaatgaaacgacctgtctaactttcgggggtcacttcataaatgccacgactttttatattaattcgtactaatgcctctcgctgcccaaatgcgatcgatatcagcagcatgttgtccgccatataaaagagcatccgcttgcttaatcgctttcgctccatcactgaatttagagtttggtgttaatgaccagtgtgattgtaaaatgatttttgttgctacatcacggccaaaagcttgtgccatttcgtattggccttgagcccaaatttcaccatcatcatgcacttcattcgttatatctttcggatatactttattcgtatctaatcggcgtaagcatgttggatctgaactagaataagctgtcgcatcccattctccaacacatgctttaccatatccagtagtcgatactgcatcttcatatgtagcacctaagaagtcgccaaatccttctcccatcgctccaccttctgctgaactaccaaagccaggaacttggttatcttgaatcgaatgcccatactcatgtgcgataataccagcatcttctgcatcatcaacaccgccagtaccgaaagttaaagcttttgttgatggagaatagaatgagttatcatcagttgtaccattaacattcacttttatcgaacggttattaatatttttaaaacctagactttgaatgtaacgttgcaatgtgtcgatatgatagtacgacataacatcttcaaagctatcatttgcgcgtgtatagttaaattgtaaattcgtagattttgttttcgcttttgaagaaatcgttacatattctccaattaaaaatcctgttccatctaaaccttttaacgtaacagttttcagttggttcgttagagctgttgaatctgcatcgttattatcttttaagcctactttactaccgctagatacgactgggttaggtaaaaatacttttcctgacccttcagcttttcggtttatatcaacctttttaattaactttccattttctgcatcaataaatgtttcccatgcaccaaatggattattagaatggactacaactttatatactggacgagcaattccttcttcaacaatatatccgaactctttatctgtaggagcccataaattttgctcacttgcttctccaacatacgccattgatttttgtattgcatctttttcactaatttttgtcgttacttccttcacacctgtaacaggctgataatcagaaacagcgagtactccctttccctctccgttaagcgtaactgttatttgttttgaaaatacaggtgcaccattaacaacttgttggaacctaacatatgaagctactgatgtttctgttgtagaaatatattgcaagtctgaaagatctgttttcaatccatactgcgcagcattttcttttaaatattcagttgcttttttctgtggcgaataagcttctaactttacttgctgttgtttttccaatgccgaaaccgtagaaatcgtccccattactaacggcacggtcattgccattgccaccatttttttattaaacatagaaccactccccctaataaagtagctcaaccttatcccattaccactaggcaatcattccccgcaaaacggatggataaaaattgaatctacgagtaattctctatgaacacttctattacctttccatttagggtaagtgaaattttctcaatatttatgtgtaaagtgaacacaatactttagaaagaaatttctaaatccattccttatccctaaagcttttcatattactgtttaaaaaaatagactattttttacctaacggtaggttgaaaaaatcacttgtaagtgatacgatttaaataacctttttttaggaggatctatatgagtaaaagtgaagaaacactctcttcaataatggaagcaagttatcgcctttttgctacgtacggtattgttaaaacaacttatacgatgattggtgaggaggttggtatcgcaaaaccatctatatattactactttaagtctaaagatgctttaattgaatgtatttttactgaattatgtaaagctatgcagttctcttcttatttccatacagaagagtttacaaaatcaaattttattgaaaaatgtattgcaattggccttaaaataattgatgaacagcgaaacgacccttattttaaccgagtgttacaagaatatgtattactatcttcaagaaacaagatgtacaaagatcgattactaactgtgcaaacagaatacttacatggatttgaagtactccttataaaagcaaatgaacttcaattaattgaaaataaaaatctagtttcaaaagctcatatgttagcattagtgcttgataatatcggaaattttatgatgattgatgcaaagatagattataaacaaatttggattgaagctgtaaataacatttttgaaagaaggggttgaagtgaatacaaaaaaacgcattatcggcttagattttgctagagcttgggcgatgtttggtatgctacttgttaatttcatggtgataacaggtgcagaaggaaatggtcccccttttttaataaccttcatgtcactatttgaaggtagagcctctgctttgtttgttatacttgctggcatcggtataactttaatgactaggtcagccgttgctagcaatgaacaaataaaaatttctaatagccgaaagaccatatggaaacgatcacttttcttatttattttaggattactactatatgtaatggagtggactggggatatattacactactatggtgtttaccttttcgttgctgcattactcatgacagtacgcaaaaaactattactttttctttctatcattattttattgttcgcacaatctcttcagcttactttcaatactttcgagggttgggtaggtccaactccatttataaattatgtagacttctggacaataaagggttttcttcgcaacttattctttaatggctatcaccctattttcccttggttctcgttcttcttaatcggtatgttaattggcaggttagatcttcataataaaaaaataaaaaaaagattactcttactcggtattacaatcacaatattgacagaacttttatcaaaaggacttacacacttttttattccatacatcggcagagagaccgccacatttttatttaatacaggacccatcttaccaaatgtattatatattttatctgctacaggatcctctattgctatattaatcatttgcctctatatcgctgaaaaatatagaaataattggtttgtcacttccattgtgcaaacaggacaattaacattaactcattatgtcagtcatgtatttatcggtattgggacattaattctattaaatagaatggaaaatcaatcactactattcgttttattatttgctactgcatttttcattttcagcattttaattagtgtgttatggagaaagaaattttctagaggtcctatcgaatggattatgaggaaattagccggataaatttccatcatacaaaaaggaagttggaattattccaacttccttttcctttaatgagccgcgcttaatttaattcgaactttcgtttcacctaaagaaagttcatcgtcttcgttcgttaagtgaccaaatgtaaattgtttaacgagtaagttttcttccaataaatctttatggttcgttaacgttcgctgtagctctacttctgtatcaagaataacatcgactcgtaaattaactggtaaattcaactgtttacgatattcttgaaccgcacgaatgaattcacgcgctactccttcttgcaacaattcttccgttacattcgtatctaacataactgtatattgtccgttagtcgtattagagaatcctgattttgcaactttctcaactaacacatcttcagcagttacaactacttcttctcctggtgttgcttcgtaaactgctcttcctgttgatacaaagttttgtacttcttcttgtgataattgttttagccaaccattcactgcattcacatttttaccgaatttcggccccgctgttttaaaattaagcttcaattgatatgatgtgtattttgtttcatcgagttcaacatggaatgcttttacatttaactcatccataacgatatcacgataagattcccaatccatatcattctcgttatgctcaagtaatacaagttctgctagcggctgttttacttttaaagaatgctgattacggttacttcttccaagttcaacaacttgtaaaacagcatccatttccgcttctaatttcggttgaagtagtgattcatttacaactggataatcagctaaatgaacgctgcttccttctaaatttagatgaatgtcttccgcgacaaacggtgtaaatggtgcaattaatttactaattgttacaagcacttcatgaagtgtctcatacgcagctgctttctcagcgttcataccagattcccagaaacgattacgtgagcgtcttacataccagttactcacttcatctacaagtgctgcaatttcacgagctgcattcgtaaattgataatcatcaagtgcagttctcacttttttcgttgtactatgcaatcttgataatacccattcgtctaatttcgtaagctttacatcatacgtttctttcggattatactcatctaaatttgcatataaaacgtagaagctatacacattgactaatgtatctacaaatttagatttcgcttccagtactgttctttcagaaaaacgcttcgcattccacggggcactatcaacaagtaaagcccatcttagcgcatctgcaccaaatttatctactaaatcaactggatctagtgcatttcctttgcttttagacattttctgcccttcttcatctaaaacatgccctagtgataacactcgtttatacggtacttttcctgtatatagtgctgatactgctaataaactataaaaccagccgcgtgtttgatcaattccttctgcaataacatccgctggaaactgctcttcaaataactctttattttcaaatgggtaatgatattgtgcaaatggcatagaaccactatcaaaccaaacatcaatcacttctggtgtacgattcattgtgcctccgcatttcccgcagcacacttgtacttcatctacatacggcttatgcaattccaaatcttctggtgtttctttcgtactatactttcttaattcggcaatgctcttcggtgcgaactgatgattgcaactttcacattcccacacgtttaatggtgttccccaatatctatttcggctaatattccaatccaccatattttctaaaaacttaccaaaacgtccatgtttcatatgatccggataccaagtaacagaatcattattttgtaaaaatgtatctttaattgcagttgttcggattaaccaactttctcctgcataataaagtagtggtgaatcacaacgccagcaatgcggatagctatgttcatatttttctttatgatacagtaaaccttccttcgctaaataacgaacgatatccacgtcacaatcttttacaaatttccctttcaaaaatggtactgcttctgtatactcacctttttcatctacaacgtgcaaaaatgacaatccttcactttgaacaactctataatcgtcctctccatatgctggagcaatatgaacaagtcctgtaccactatctcccgttacaaaatctgctgcaataacgcggtaaccatttgtaacttctttcatcggaaatggcgctgtataagatgtgtttaataattcttcgcctttatgaacagataatacttcatagttctcttttaatacttcttgtacacgttctttcgcaacaatgtatacatgactttcttgttttgctttaacgtattccatatttggatggacagcaagcgcaacgtttgctggaagtgtccaaggtgttgtggtccaacctaaaaaatactcattttcactatctttcactttaaacttcacagttgcacttaaatcttttactgttttatacccttgtgcaacctcatgtgagctcaatgaggtttggcagcttgggcagtatggtgaaactctatgtcctttatataacaatcccttttcatggattgtccccaaaatattccatacactttcgatatatggattccttaaagttacatatggatcatccatatctacccaataaccgatgctttcagtgaattcacgccactgcttttcatatgtgaaaacactctctttacacttttgaataaatggttcaatgccatattcttcgatctcatgtttaccagaaataccaagttgcttctcaacacctagttctacaggtaaaccgtgtgtatcccatcctgcttttcttactactttataaccagccatcgttttatatcttgctactaaatctttaattgcccgaccaagtgcatggccgacgtgtggtaaaccgttcgccgttggtggtccttcataaaacacaaacgattgcgcgccttctcgattctgaattgattgttcaaaaatgctttgttcgttccactgcttacgaatacgtgtttctctccctacagctgactcttttacatctactttcttcatctacaatcactcctttgaatgttttaaaagcacacaaaaaacccgcccctatgaagtagggacgggtttacccgcgttactaccctaattctattagctttttcactaatagcgcttagcaacgtactatcatacgtgttctttgtaacggtagacatccgtccgggcttactcactttcagcctcgtctcctcggagatgattttcaaataacttctgcccaccggctttcagcaatataccggctctctggagaacagttcactattttactctttctcgtcttcagatttgtatactttgttaaaagttattttatgccatttagcaactaattgtcaactaattcaaaatatattcttatccttatctcctattcttatacaattacttttcaaattctcgcaatgctgctaaattttcatcatcctcaataagttcaacaaagaatcccgagtcatcctcacgaaggacaatttcaagctcttccttcgcctcttcatttctatttaactgtgctaaataacaagcacgatcatatcttgctaacaaatcacttgcatccattgttaatacttcatttgttattttttctgcctttagtgtttggccggcaccatgatatgaagacgctaaagaaagaagaattactgtttcatttggatgatgtatagaagcattttctaatacttgaattgcctcttcaaacctttcttgactttgatatatttctcctaaagcaagaaatgctctgcttacaaacggtgtttgctctgttaattgtaagataatcttttctgcttttctttcttcccctgctttaaagaatacttgtgcttgcagaagaagagtatcataatcatctggtagttctcgaaccatttgcttcgttaattccaaagcatctcttaacatatcttcttcctcgcactcaacgaaaagatttacaagttgcttcgctacttcataatcccatttattttctagtgacgtgtgcagaatctctattgcttctttattcatctctacattctcataaaatagcgcaaatcgctgtgctgccatactatttttcggatttaactttaaagagatttcatataaatcaattatcatagtaaccattgaaatttctttcgcacgatttttcatacgataaaaagctctcgtaatgatagatcgtttcggctgttcatgcagctggcgttcaatccatatttccgtaaccgcagctgcagcatacatgaatgctgtacttctttctgcttttttcacctttaacgtatgaagaaaatctcgtatgttagacaattttttatgttgctctactgcttttacataaacatcaaatatacgttcattatcaaaatctttttgtattactttcattgcaacttcaattgcttttacatttctttttttcactaatacttttgcataatgatatagaacttctatatgctcaccatctaattgtagcgcgtattcaatctgtgcttgttctttatctatttcattcatcgctccgtacacatatgcaatcgcatctaaacgccatatttcaggtacttcgtctgctaattgctctagttcagtcagcaattcttcctgaagattcatatctactgaaagctgtgctaaatattccatattaatatgcaacggctcttctttcatcgcctgaaccatatgactttgttctttagaacggttttcttctttttcgtatatttccgcaagctgtaaatgtacacctacgaaattcccatcaagctctaaacatgtttcatacgcttgttttgcttccgtcaattgccctaatgccataagtgtttcaccaattcggtaatacggtaatgccgtttccatttgttctatcgccttattatatcttttcatcgcttggccgtactgtccaatagattcatataaaatacctgcataacaaccgtactcacttacttcatttctttctttgtgtaacgttcttaaaaatgctatacctcgttgtacaaattccgttcctttaattcgattcacatattcatctaacgcacttgctacattataatcccttttctttataccattttctaacttagatagtgctactttaaacccttcttcatttccaccaagttcaatttcagcatcccataaaaccattcctgcattcatgaggaaatcttgactcttttcaatttgcttctcaagaccaagaatatattcttttgcttccttatattgttctcttgccatataaacttgtgtaagtccgaagtgagaataaacatcctcatcattttcttctaaagcacgcttatacaatacttctgcttcttccaagctatcattttgaaaatgataatcacctaattttacgtaaagaggtgctttatcatcacaattctcaataccgtttaataaaatttctttcgcactttcctcatccttcaaatcagattcgtatatttccgaaagtttcgtataaatgtaaggtgcattactatccaaatgaatcgctactttaagcccttttattgctaaatataatttccctagttgatgtgcacatctcgctcgttcataccatacatgcgcttcatatttgtactcttttaacaagtcattaaagatttcatatgcttcttcatatctttctaaatctattaatattaaaccgtgatttgttaaagtgaacctttcaggactacgctctaacgcaacttgagagtattgcaatgctttttcagattgatcaatatacatataggataaagctagaaaactccaagcaataggctgatctgcgtctaattgtaacgataaacgaaagcttgaaatcgcttctagataactttcctgttcaaacgcatatcttccgtttattaaatgatataaagcacgattatttttcttctcaacgcttgtcagcatttgctccgctttctctacttcctgaagacgaataaaacactgtgcaccatgcaatttaacaaagtccgagttcggaaacttttccattaacttatcgatacaatataaaataaattctttatctacttcaacatctaagtgctttatcgtatataaccacgtatttggattatcactcgtttcttttaaaaattgtactaggttactaattccctctttgtcatgttcatctaaatgatcagtaagagaaaaaatagatttaaaataacgattttcttcttcacttagaaactctagttgctccttcttttctttcggaacaaacgtgattgctaaacagcctgtataacgatatttttcttgtactttactatattccacaagaactggctctataaagtttggatcttgaacatagaaagcttgcaatgtatcatcatatccagatagaacttgtacgtgtgaagcatgctcaatatctatacttaataaaacaggaattccttcgtcaatcagtctcttataattctcttcattccctttaaaataacgatattcataacctaattcttctaaataagaaacagtatctgaaaacttcgaacctgtcatatcaaaaataaactctgctatttcatcttgtgtacgtttctctccccatatacgcaacgtcatctctaaacttgtcggaacacaataattatccttttgtacaataggaactatcggcaagtgaaccttttttccatccggatttttttctaaattatgatataaagattcttttaaactcttttcttcttttaatagtttttgtaaatctgcaaatttattcattttgtacagcgcttctgcacgtaaatgtacaaagtaagtattataggcatgatatggcagctgagtatttatattatctattaccgctaacatctcttcatattgctctaaatctaataaatactttatcttctcaaaatgaaaatatggtacttgtgggaattttacaatcgcatcattgattaactgtatcgcgcgtttttgttctcctttattcgcatacaattgtgataataaataggtagataactcttcacaatcttcatgctgcatgccagcaataaattgttcttccgctttctcccattcacctgtatgcatataaacgtagccccatttatcaaacactgcgcgcgcactgtactcctctgctttttgcatatacattaacgcttcttcgtttcgtttcatttctaaaagacatcgtactaacgtaaaatatgttttcgctaaaaaatctgcatctatttcttctttacttaactcttctaaagaagattttaacaactgctccgcttcaagaattttccgctcatcaattaactcatcacaatataaagagagcgttctcatatttgggaattttttataagcgtaacgaatgaggaatgaactgtattggtgcataagcccttcatcagtaaggcgaatcaatatatcgaactccttatgcgaaggaatattggcaagccaattcttcacataggataaagtattcgtttcttttatatatgcaatttcattatttatttcctgtaatccatctacaaatctcttgtcttttaaacaagtttctaactgcttaaaatctagcatgcattcacctcgaatttatatttaaactgctacttgcttagattttacacaccatatagtatgtattcaactaaaatctcttataatagatgttattaattaatattattcaaatttataacaaaatatagtaaaaatgattgtttttctccgtattttgtttaattatatggaataacgtaacatgcggttttaatcttgtagaagctgaaattagtacataaaattatatcggcgattttcaaattatatcgaccgattcttaacatatatcagcgattatatgtcgaatatcgacttatcgacattaaacgacaagccttatacatcataccttttaacaaactatgtcaccaaatgtaattttcatattgggagcgtatacaaaagaagaatacacatgaaatattttaaaaaatcgtagttcagcttcatattgagctagcgcattatcatatgttaatcctctggctattaaacgttctacaaattgttgcttatcacccggatcacctgcaatcccctcttcttttaatgattgatacaaatcgtttttatcattgtgatgcatatttgaatctaaaaagttcactttatcgcttactctacattcaatatttttcacacctaattcacttaaatatatcggtattttcatgcctatattgccatctttaccatttctttgcgtatcactttcaaataatttctgcaaaacacctagctgaataaattccgattgtttctccccatctagtaaataagaagccatattagaaatccaatgtggttcaaaacagattatttttccgcctccttttatatacaaaactaaagttctctatataatagccgtattcctacacttttcttaaaatttcaaagcaaaaaagctagtgtatttttaataatacactagctttttatttggaagaaaaatttaacaagtacaatcacaatcaaaacaatccgtacagtctaaatcgtcacaatctgcttttctctttcttttgtttcttttaagataataatacagtagcccaaacaatagtatacaaataacaaaagctattattgcttctgtatacttattttgaatcataaaaccaattccacttccgcctgaaataaaaattagaattaaataaatccagaacatctatgtaaatacctccattactatatatcttaagataatatccatataacactagaggaaatgaataatcccataccattaccgcttaatacaccagtagttattcttagcaaatttgagctacttctccatttccacttttgggtgaacccatcgataagtaacggaatttgagcgaaaaatgatagtatgattgccaaaagaaatgaaggtgtcatataaaaataaattggaaacattaaaataccaataagcatgcctgtacaacgcgcacataaaggtatgtacttttgtagtttaaaaaaactcctatctaatcttctatgacaaggaatttgtaaaataaaagttcgaatcaatatgaatcaccctctctaaaaagattttaattgattttgccaaaaaaatatatattcaataaaaaaacaaaccaggtttatactagacccagtttgtcagtttactactatgttacatctcctcaggtgcctccaccccaagtaaacgtaatccttcttttaatacaaccgtcacagcataaaccaatgcgagtctgctgtctttttcttcgctctcttctaatatacgaacattaccgtaatatttattgaatgattgtgctacatctaatatatatttcgaaataatcgatggctcatttttattgaaagctgcttcaattatttgcgggaatttatttagtaattttacgacactccagctatgatcgtcttttaaagcaaatgtacatgtttcaaattctacactttcttttcttaaaatagaacaagcacgtgcatgtgtgtactgtacgtaaggtcctgtttctccttcaaatttcagcatattttctaatgagaattcgatattatgcatacgctcattttttaaatcgtggaagatgactgcaccaacaccgacttgctttgctacttcttctttctgttttaagtttggatttttctcttcaatattttgttttgcaagttcgattgcttcttcgagtacttcttcaagtaaaataactcttcctttacgtgtcgacattttcttaccatcttttaaaatgaagccaaacggtacgtgttccataccatcaacccaagtatagccaagtttttttaatacggtgaaaaattgattgaaatgtaagctttgttctggaccaacaacatatagcgctttatcaaacccataagtgttttgacgatataaagctgccgttaagtcacgcgttgcataaatcgtcgcaccatctgattttctaattaagcaaggcggcattccttcttcttctaaattaacgactaatgcaccttctgattcttcaagcaactcatgttcttctaaaatcccaataaaatcttccattaaattattataaaatgcttctccctgaaaattagtaaattctacgccgagaagttcatagatgcgagaaaattctttaagggactcatgacggaaccaattccaaagctctaccgcttcttcatcaccttcttctaatttcttaaaccaagcacgtccttcttcttctagttcttcgtcgtcttttacctcttcatggaattggacatataacttaaatagctcacgtattggatcttctttaactactgcttcatttccccattttttataagccgtaattaactttccaaactgtgttccccaatctcctatataattaatccctacaacttcatagccacatttttcagcgatatgtttcagcgaatttcctatcattgtagaacgtaaatgccccatcgaaaaaggtttcgcgatattaggagaggaataatcaattactactgttttttcacagccaaagtggttttgaccgaactcttctttctccgctaaaactgtttttaatactgcatcacttacagtttcacgattgaaaaatacatttacataaggaccaacggcttctactttcgtaaaaaacggattatttaatttctcagcaacttcctttgcgataagagctggtgcttttttatattgcttcgctaatgaaaagcatgggaacgctgcatctccaaattcatcttgtttcggtgtttcaattaaatctaaaatttgtttttgcgttaattcattcgtgaaaatattagataaactttccgcaaactgcattttataatccatgatacaacctccttattttttaaaacacaaaaaactcgtctctaaaaaagagacgagttttaacccgtggtaccacccttgttgttcgttacgaaccactttcccgtttataacgaggacagggggcctcggctttctctactattcgttcaagaagcatctccgaagtgcgcttcatctttttcttccgtactaggctcacaccatccctagctcgctttccttctaaaaaagactactctcttcatcacagacagtatatttaattaattattgcttattatacatcttttcaaacaattagcaagggtgaattacaccaaagtgaaacttagcactttttcttttgtatacataaaaattgtgtttttcaaatctagaactacgaaaataatcttttaaaacgacacgttttctcgccactcgttttgcctccgcaattgtttcatcagtaatatcatgatacaaagcgaagtgttttaatcctttaattccgtcggattctatgacagtttcttcaaacatcggatcaaggtaaacgacatcgtaactattgtcttcacattgcgctaaaaatgaaaaatgctccgtttgctttacttgaattctttgcattgcttcatcaatttcagaaacggatgaagaccatgttttcaaaccattttccataatataagccatatactcattgccttcaagtcctgttacttttccgctttcaccaacaacataactagctacaatactatctgatgccatcccgagcgtacaatctaacactgtcattcctctctctaattgcgtggcttgtacaaacggatcgtgttctccacgcattaaccttttcacacgaaacatcgctgagttcggatgaaagaaaaacgattcttccgtacctttcggataaatagctaatcggttcttccctacgacaagcacatcttgttcatactgctcatgcagcttatgtactggtatgtcattacgtttaacgaatgaacgatttaattctgcggctacctgctttgcataatctgtcatttctttattcgttcttcctgctgttgttacgatcattgtttcacctctatataaagaaaagagggagatttactctcccccttctttagcaattcttttcgaaagcttgttctaagttcgtaataatttcgtccatagttgcaccttcaatttcatgacggtgaatgaagtgaacaacttcttttccttttaataatgccatagatggtgaagatggaggaatttctccgaagtattcacgcatttttgcagtagcatctttatcttgacctgcgaatacagttacaagatgatcaggttgtttttcagcacgaacaaccgcttgacctgctgatggacgtgctaaaccagctgcacaaccacaaacagagtttacaactactaaagttgtacctgatgtattttccataaattctgttacagcttcttctgtagttaactcttcaaacccagaacgcactaactcttggcgcattgggattaccatttggcgcatgtattcttcataagcatttgacatcttgtaatctctccttcaactttcattccaaattcatcatatcacgctctattaataggtgcaaaagaaagataacgatgatttcatttttttgtagggatttcacaaaccccaccgcggcaatgccccactggaacaagttttctattgttagcgatataatcgtatactttacttccaaaaccaagtacgatagatagctttataaaaggaactgcaaaccaataagatggaacggcctttgctaatacatctatgctctgaataccgtcataccacttattatttttaaaaatatacagtctttgttccatcttactttgtagttcttgagaaagctcatacttctcaactacatcttcatttcgaaatgaaacaaatttcatcttaccctttttatctaattttttcgtacgttctgcaacagccgtacacatcggacaccaactatcatagaaaacaatcatacattattcccctttacgtgactccgtcatttgtttccatacagaaccttttgcttcttctccgccttcaatacgctctaatgctagacgtgcttgcatcgctacttcaaactctggatcatcttgcgctgcttttaatgctggaatcgcgctttcatctccaagttcaaataagaacatcgctgcacgccagcgtactaatttacttggatctttcagagatttaatcataacgaacatcgctgccggatcacctacatctgataaacaatctcctgcagtacggcgaacacttacagagcgatctaacaacgctttatataataacggtaatacttcatcaccttttaccatacctaaatacgctgttgctaaacggcgtattgaaactttttcatcatctaacgccatcttcaacactggaatatcttcttcagtaggatccatttgttctaatgctgcaaaacggtttttccagtcagaatctttcatcatctcttctgttactttatatggctcacgcttttggatcgttacttcaacagcacctgcttgatttaataattctttaaccgtttcatttacacgttcttctgaataagcagcaacaatctcttctactacttctttcccgatttcttcaaagttaccgtaacgtgtactttgttccacccatttacgctcttttacaacatttggtgcagacatttgcactttcataattgattctttaaaacgatcaggtaaaccaacacgttcttccgtcgttccatctgttaactttacttgcattggaattgtaaagaacatttgaacaaacactttcacttctccaaaatgagcaagttgttgttcttcactttcttccactacttcttcgccgaaaacagcacgaacttgttgtaataaaactttccagtcatacttcgcatttcgctccactgctaaaaagtcggctacatgatatacacctttaatgccttcaattttcaaaatttcttgcacttgcattggtgcttgttctttattttcatttgtataattattacgtgctcctgatggtaatacttcattcaaaataactttcattgtgtttggacttggcgtcggttcaattgctttaatcttcacgtaaaaaactctcctttattgcatgttcttagctgtattgtaacatgttatcactctatactcctactcggatgcttaattttactactttcttcccactaccatactatttcattctttttacattttaaattaggaacgggattttaaaagctttcgtttccgataatttttattttttatccatttcttgaggcatcgccattatttttgaaaaaaacacgctaaacaaaaaaatataataagctatccatatggatagcttatttacataattttcgttattggaagacaactatttttataaatacaaaaggcagaaaagtatatagattctacaaaatattttgattgtgatacatttacagaatctcttattttataattaatgtcttattattttttggagggaattcgatgaaaaagtttgttttgatatttgggccacaagcagttgggaaaatgacagttggacaagaactagcaaagatgactgatttaaaattatttcataaccatatgacaattgatttattggagccattgtatggattctcttcggaaatgtggcgattaacccatcttttccgaaaggaaatatttcaatcattttcaaagagtgaacattatggaatgatttttacatacgtatgggcgtttaatgaaaagaaagattgggatgatgttgaaagtatatgtaatatttttcgttcccaaggggttgatatttattttgttgaattagaagctgatgtagaagaaagacttcaacgaaataaaacacctcatcgacttgaacataagccaacgaaaagaaagattgaacaatctgaacaaaatttattaagcacatttgaaaattttagattaaattcaaaagaaggagaaattacagagaaaaattatataaggatcaataatacgaatttaaatgctacagaagtagctgaaattataaagaaagaatttcaactatagttttttttaacaaattgaacagttcggattttatgaatatcatatacatttctaattaacataacgtcctattatcggttgcaacaaaaagggattccttactctcagaaggaatccctttttttattttctatcactcgattcatctttttatacattcctatcctgtgatgggttttatggttctcgtttgttactggattagccaaaaaacgttctaaaattttgtatactctttacttattttttcaaaaaagctggcggtatcccctctttaagtttattaaaatactttccacaattttttccgaagctattacttaaaatcaccttttattacgatgccccctcccgccttctctccaaaaaggtaatactctcaatcacaacttcagttctatatattctcttgccttgttcatcatcgtaattactagtctgaatacgccctgtaatcccaacgagcgaccccttcttacaatattcagctacattctcagccgatttgcgccaaacgacacaattaataaaatcgacttgttgttcacctaaactatttcgaaatcctctattcaccgcaacacatattcgtgcataagcgacgccttgttttgtgtagtataattctggctcctttgtcaatctaccgattaatacaactcgattcaatctctgtacttaattatgtgtgtaataacttatttttgttagtattaaaacgttctctttatttctacacattgcttttatgtagaaatagattagaaatatataaacctgtctaaattaattactttttaaacataaaaggtaattaatctatattattataaggataaaacatataacaccatccatatacatagatggtgttatatgtttttataaataggtacaaaatgctctagactggagaaaatcattctattctttatttatataattctttacagtatactagtttcttgtaattcaaaatctaaaattttcttaaattcaccttaattgcttacattccaacaattagttctccttcatttgtaactaaaattttcatttcttttagatttatataagcctgtttttctaataatttatatttttctttaggtagaaattttggccctttgataaaactcgcaggacttgcttttaaattttttaacccctttactacttcaggtactatttttaataaataaggagaatctaatggtgctgcatacctatattctaaaatacgatacacagatttctccatctcctcaagacttctagaccatttcccttcacaaatagcatcacaagatgcatatatgacagcataaaacatagcagaaatattatttttcctttgtaaatcaggcaataaagccccttcctttatcgggtctacatgtttggatatttctattaataaatctctgtaatctccggtatatactccggcctcaataaaatcttccattcctgaaatatattcataggtactagatgggaaatatgtttgccccataaaaagtttatttgtactagagaatctctcaattatcttatcccatccctcccagtgaatattgaaaaagtctaaagtggggatgtacgccatagtaccatcatgttcgtatggtactattatagaaatttcagtgtcactagttgtaaaatgatcccatccagtaatccaaacaaccctttcatattcttcatgtttacgctcattaactacacctatatctaaatccttaatttcagataagaccagccttacgtcggttaatatccttatagcctccataattgttatgtgagttcctgggttatgctttgctttattataggatgtccgaagttggtgaagtgtatgtatagacttagaagaaacacctaactcctctaacccatcaattaactcaaagaaattttccctatttcttctacttttgtatactgcttctttaagaaacaattctattgttgatccaatctctttcaaaaaacttttaacgtcatgttctgtatgatgagtactagaaatacctagagcatttgaatatgattcatttacaatatttaccattatttcgatatgtgttctcatactttcactccttaataattcctttatgtatatgctactttattattaaagtctatatttactatacagactacaatctaacaaactatagtacctcgaaactattctatctatacctcttcatgtatttgatgtcactttttcatttacatcaattccccaatacgaagcgtagaagtcattactagaatctgcattaatcataattataaaaatatggttataagctttaaacaaattcagtgtgaacttaatgatgaattaggttttaattatcaggactattcattaagcctttaatttttaaatacaattgtatccataaaacaaaaaaaacgctattctttttgtagaaatttacagaaaggatggcgtttttgtatgaatctttcgattcaggatgagtttcatttatttgctgaggagctacagcgatatctatatccacatattctttaacaactcgcacaggaaacaagttttgtaaaacggaaaagtaagtatggcgcacgagatttggctgctttatgtatctggattaatcaacaggtagcaagcaattctcttactcgattatgtagccaattttatgcaaatgcaaatacagctacatttaagagtccacaaggacttaattaacgtttatattaccaataaatatcccatgggaaattgttccgatggaacaggttcatgctatctactcaatacgttggcaaatagagattgtatttaaaacatggaaatctcttttgggtatcaatcattgtcacaatattaagcaagagcgtctagaatgtcatctttatggacagttaatcgctatttttctttgttcttccactatgttcaaaatgcgacagctgttactacagaaaaaaccaaaagaattaagtgaatataaagcaatttatatgattcaagatcatctgtacttagtatatggagctatacagaaagacacccaagaaatatcaaaaattcccttcatctgtttgacctctacagaaaaacgaaaaaaatcccatagattcgagaaaaagacagtcttctatattttaggtgtcgtttatcagtgtactgtatccaatctaaagcagaaaactgcataatctttaaaaagacatcatatcaaggcttatttggtatgtgtatttttaaaaacaaataaacaaattatcaagcatgtaggcaacaagaacggaatttcatgaaaaactcaccctcagcttgatgggcatgtatggtgaccccttataacaaacagtccatatattactttattttctcttcatagccccttaacatttcataccccgagaacagtaaatcctttaaatattcatcttctaaaaggttatttaacatctctaaattccctatatttttatatacatgtttcaaatctataagggtttcttcacagtacatttggttaattgaattaatataatctttagtaaccgtcttaaattgttcttcaattaaattttgtgatattacaatgctattcatattacccttagacttcttttccaactccctatccaatactttctttaagtaaaaataaaatccagttctgtctctacacatattaattgatttaatcacatttaaactaaaatccgattcatcaaatgcatacagcgatttataaagaatataaatttcctcaatatccaatagaatttcttcacttaataaagattccattctattgcttgttaaaaaataatcttttaatgttgcaggtaactttattttatttatggtgctattcatacttaatttatcatccttctataatattagaatccattctaatattatagactacacgactcgccgtgactatagtctacatgtttaaagattaaaaaatgtacttatgacactatcttaatttatatctttactctgaatcatgactaaaaacatttattcattttcatactaactaatttaatactgacatctatcctataattcttttattagtaaaatatagttttattcttttttgcagactatagtctgtagagttaaagaaatacctcttccaaaattatcttataaatattgggagagtggtttcttgagtattgaacaaacttttggtaatgtcttgcaggagtatcgtcttaattcaaaaatgagccaagaagaattagcgtttaactctggattagacagaacttatatcagtcttttagaaagaggaaaaagaaaaccaacaataaacactttatttgcattagctagagccttaaaagttaatccgtcacagttaattaaagaactagaagaaaaattatcaaatccaaaaatataaaaagaaacaaaagaaaatactttaagtgttttcttttgtttgcctataacatttaaagaataataaaatagtttgatttcagaaggacgaattattaaaataactcctattctacctaaataaacgtagtaagaactatgaaagaatagttaaattaattaaaacaaatctttcattttttcatctttatattcgtctaatactttatactttatttcagttttttcatttatccagcccacgaaccattcttctttccgactacgttcagatatcttttccatatagaaatcccatacaattgctagtttatttaattctaaatactcttctaaataatctgctctaaataacaagtttctttcataccctaaatactgtgcatcaaagacaaccatattttcagtcttgtctttccataccccctcagaaacttgaactagttcaaaaaacttcactaaatcaacatttggtaaaagataactgcatgaagttttttctccagaaacagaatttatatttgcctcccaggaatattcccaaactgaatcttcacactttatattttcaaattcattttcataatacatattcgaaaaagctgggtgccaataatgttcaaatgcaaatatatcatacgtatttttccaggaaacacttatatcttctttattcatagactttaaagcgatgtaattttctttatctttaagcggcaagaaaactgcctttgtctttataaaaaactcatccctatcaatgaagttttttccgttatccctttcttgattaatcaattgtgctaaagatatatatctatgtcccttatactcaataaatatgaaattaccgagacatttaaactcctctctattttgggcccaaattttatttggcttatacggtaaataagattttattaaattacgcgtatttttttctggtgggtgatctaataaactgggatcaatattccttaaagacgactcccatggttcatttatttccttattaacaggatagttatcttttaatttcgctagtatttcatataacgcaatccactggtactttttaccgatacgttctactagattttcgtgcctattatagtatcttagatttttatcataattaccatgcaccttttcgtcatatccatattcaataattctcattatagcgatattacttaaatcttgatcatcaaattgatccttccagttatacacttcacgtccaaaaacatatcttccaaaatctccataagccccaatacctcttccatattccgttgtcatagatttaattattgaatcaaatccacaatacccttttcctgatatttgttgcatttcttttaacttgatatctatttcttgtaatgaatatgtttttttataccagctactcgaatatggaggatttattttttcgtatttttcaaggttaataactcctttatttacagcaaataaaataatgcttcttgcataatctctaattaatacgttcggataaacttcatcttgtaaaaagatattagtataaataacgtcaactatttcaactaattgcggtactttatttattcttaaaatcgctccatataagctgatcaataacctttccagaacatatggatcatttacatcaaaaaaccttttaagatcctttaaaataattgaaggttctttcatatatattcttattaatgcagtagtagaaatatctcgcagttttttgtcagtacatgtaaacaaccaaataaaagttgtagataacaattcaaaatttccatactcgaaatgttgaaaacttaaattttgttttaaaagaatctctgcaagtcgcgtaggtacttctgaattaccatttatagatattgtccaacttccatctcttgtaggcatagacatcttgtaaagattctcatgtaaaaattctgcgtttaacggtgattctataatataagactgttttaacaacctttcgtatactaagctttgtaaatctatatctttttgtcttaaacatagatttacccattcaaaggttttgtcatttatattttgtacgtctctccatgaaatccctcgaacgaacgcttctgctatattaaaagttatacgctcaaagtcaattaaatctagccattctacttttaatttttctggaataattattgatagactctcataaactccataataaaatgagttatcagatgacaatatattttcaaataagtttttgtcttgttgatatctttctaataaaactagggatatatatatatctgcaaatctctcataagtaaaataaactaggctttcaccataactcctttcattaattgataaaatgttttcttctgctaaacctaaaagtatttctcgatacccaatagtatatggctttgctacattctctattacttcataaagccgctctaattcaatgtcatacctctcactctcaataaattccgaggcgatttctttcaaaattttatctactaaatttagtgaatttacatatgaaaatcttttatcaagtgatagcctaccattaaccttattaatatatttttctaatacttgaactatactccaacctcggaatccaacatactcttcttgaattgcttcacaataaatttgtaagaataggggattataacactcgttttctaaagaagggaatattaccggatttatcttataaaaattaaaaaatgggtccaacgcttccaaacttagattattaaatcccttatgctctaatttatacaacggaaaatcttcttcaatattttcaggtaatatgcttctcagataattactcctaactgataacacgacagcaatattttcaaattctttaataaaatttaaaaaattcatcaaatagcttttccaaaaatgtttaccttctccttcatttaaagcatctattataattacagtttgtttatttttcttctgtgctctgtcattaaattctttaaaaaaggactctttagaacctttgtaatcaatcaaatcaaatagttgtttataaggatgatcatgtgtatttaaatgttgacctaaaaataagaaaacactatgcccaacttcttgcaatcttttagcattgtctgccaataaatgtgatttcccaattcctgcatctccataaatcaatagatacggattgttaattaattgaggttttatcaaatacatataatcattcattgctctttcatgtttggttatttgattgattaaattaatgacttcatttctaatgttttttttagtttcttcattaatcttatatcttaattcctcaacttcttccataaagctattgatttcttctttaaagctcttcaaattattttctaaataaaaccctttatcattataattaatattctttaaatagtttaaaatctcttcaataaaagaaagattcttaaattctatatcttccttatacgtatctaaaaccacatttaaattcataatactatcttgaaacttattaattaacacagtgaacttttcaaaaattagcttgtcacttactaatgaatcaaatacaacatttagatccgtttctacattcgcttctgaattataccttttacctaaatctaatatatttcgatcaagtatttgttctaaatactcatccgtatatttttctaggtaagccctttgttgaatttcatataaatttttttcaaagtattcttttagactgttattactttcaacaatactattttgaacatttgccaaaatactcatttcatttactttaaaacttttgtccctatatccttcaagatatacaatcaactcattaagatattgtgttacaatcggatgagtttctatctcttctagcttcacagattttctataattatttatttcattcattgctatttgggataattgctctacaaaagcatctttagtaaccgttctatatgtagctccaaatacataattaaatatcaaaagcccattcttttcttcattcaaaaacttttgaaatgtatttgaatcaacaaatgtgttttcaaattgcttttgaaatgattttatcttttttagtttgtatttaatcttccatttttcgatgaaagaagtagtcagcaaccctattattttacttattataggttttagaataaatgtaaacttaagcaattttttcactcacacctttttaaattatatttttatgtacctttaaagcggttgccacccatacttaacgacaaaaagacgaattcgttttgaaaaagtttaatcaaaatgaattcgtttctttttggatggactccccttttataaaaaagttaaatcaaaacacacttagaattctttaattgaaagaggcaaactgtcaaaacttattttaaggccacactactcacattatttttcatattcattcacaccaatagagccactattatgtgaaagttctcttggaagagttttaaaaaaactttttactttcttagcatttgtcttattacaataaattacttttcttgttgaaaaacgcatctgatattcattatagaatcttaagtcattcctactaagtttaaaaatagaattatcaggattttcatacgggaagtttttctctctaagaatcaatagatgtttaggtgaaattggcaaacaaaattcattgaacgattgcattgtttttccgctggcgtgtttaatatttaccactggattatctgaaataaccaattcatccatcaccacaactttggattccatttcctcaaattcctctacaactccaagaaaccaatcaaatctatcacttagaagataatatcctaccctatttaaaatcccagaggctaagtgcatcaatagtttttcattatcatccatcttaacttcagcaaaatcaggtatattttccgcaagcatatcgctaaagttttcacttaattctctgaaagcaggaactctaatgctttgtaaagctatgaagaatactaaatctatcctatcctcttcatctaatatttctcttagactacaatttaacaaatttgtttgatcgtttaatttttcattaatttccctaaagcatctagcaaattgagactctaatacagaaaaatgctcttctaaaaattgcttgtcaaaaaaacgagaatcaacagatccgttagcaactttctgttgactttccaaaaactcctcagaaaaatcataaaaatatttttgttgtgcaacattatcaacatgcatattagataagtttttttccaaaactttatcataataatctaccttatcttcatttgcaaaatacttaagataaaaccttggtacataatgctgttttttaaccattccctcacctgttttctaagaaattttaataatctttatatattcattatatcatgttagaattttttagtgattcttataaacaatgcaacgattattaaatactacatatgaataaagaatagcagtataacatcatgctaccatttgtataattaattatttgaattcgcatgattattaatcatttttacatttgatcttaactaatagcaccctttaacgaaaaaaaattccaattaatttttcgttgttttgaatgtgaattagaaattttaatcgtttgccttactataccccaattcctatccaaccgtattttttttgtttactttcaatatgataacgtgaataggccccccccacagttaccacgtttgaaattataggtataaacatggtaggaacagctaaatagtaaaaccaattatctactttttcccacttatccaacttagagatctccttatttgctttcaatatatctgatctgattttttctgctaacttaatatctccattgttcattaaatttttccattcaattaatacctctctaaaccttttaatctcctttttttctcttaaccttaacaaatcatcaattgattctattctaggaatatattgtatttcatccttcatttgaactaaacatagtttatatacttcatgcatattatcaccttctgtttcgttcgatgtacatgatactctttttgaaataaatggtaccttaaattcttcagacattttcataagagagattattgatgataattcaaactccatatcaagcatgtcaaccacaaaaccaggatagctttcttctctttttaataggctatatatataatcaacaggattacctgtatccaaaagtctttctaatggtaaatgtgtgtaattaacagcttcttcatgaagccctatcctccataaattgataaaatcaaatagtccatctacatattttttggctaatcccctttgctcctttaaatgtggctgtcttttttgaaagtgtttaactaaatgatttattaataaaggttttatgttttctcctaactgaatgtcgttataatccacagtattttccacatcgttcaaatacctagattgcctaacaatcccctcgaattttaatttttctagtacagcaaattcacatggatcattcaaatatactttatcaaataatagtattaactctaaacacttcttttctaacaatccatactctctattacttttaaacttatttattaaatctctgtctaattcaccattttcttcaaattctacatatccatttttataagcgtttttaatcaaggcatttgaaaaatgtctgtctaagataattccattatgattttcggccatatttttccatcctcttcgtaaatatgctttaatttgtttggagtaattcatttcataataaactcgattttagtataaaactttttattaaatgttatttttagatagcagcctgcttaatttagaatgccaaaactttaatacctccatcattttaacatatatatccatatcaaaaagggggcaacggtgtatttttttataagcagtcaaatttttttcaaatggttaaattttattttaaatccatatattaaacaactattatattctaaaaggaattcgtgattcgtaaacatttgtatatacagactcttcacgccgaacataaatctctctaaacaactctatcgatatgcaaaaaatcccccttgttaaggattcttcattctctgatatatatcggtgctgcaaagtttttagagttactgtctatagaaacaccagcactatattaagaggtgcactagtgtactgatattatttcctaactcatccgtttgtctaaataacaatttctttatctatgtatgaaaatatcaagggactgatacttatcaatagtatcgcctttttcaaaagatactccctaatttgaacaagttttaaactaatcttagtttcatattctttcaattcttcttcaattttggccgtgtccaattcaaacaacctactaatctacacattagaatacatattagccattttaatttcactaaaatgtttccgtttttataacagtactgttcaatatctcacactaaaacacaacaaaccaacaaatagttttaaacactgaccaaacgaaaattatatctcattaattatttatacttaataaatgttctttaaatattttgaagctcttccactgtaataattcacttacgattatgccggcaaaattttttgggtttttctccccattttgaatctccgttactaatatacaatcatactttgcaggttccattatttttaattgtttaaagacattaatattatgcttttgtctgttagttaattctgtgcctactccacgtataatatcatcaagacccgattcataatgttcatattgatttctagcagccacaattaaatcaagtatacgtaattcttccactcctcgagctggattattccacatgatgtaattatcattatgcattataatcgtgccccttttatttttatccctttgaaaagatatgtcataaggattaccatgaacagtagatatagcttgtttagcaatgtgtagcaaagcaccagaaagaacattgattgaattctctttagccttaaattctaacttaagttttgctagtctacctagcattttttctttttcaatggatgccgatgtagacttatctttagcttcatatatctcgtaatcctctgttaatcctgcaatttctccccatgttaattgtgcttctttttccttctcttttattttcttttccaaaagttcaatattgtttttgtctttcgtaataatatttatgagttctgaaaccgcaaattcaatagattttaaatatgtttccaatttaaacttctccttcactaattgagcttaacctaacatttccagcatccatagatgtctgtaaatacatttaatcactatggttataagtgtatccataccaagcaacatcttcttgctgaaaaacacatatttcatctgggtctaaataatgattatagcttcttagattcatagatctgtactcttgaccttcattatttaagttaaaagctggcgcattttcttgttgctatttttcatcagcccttcttttatacgtataataaccagcataagctcctatgcaaacaccgataagtcccgtcatagtaagctccgaataaaaaagattttatattatttatatagcctttttatcttttaaattctgtatacatcctattgaattatatcaaaatcaggaaattaattgtatatttgaaataaagtttgatcaaaaacacctctcaaaccagcatttcacaatagataaaaagcattcatttcgaaaaaagattaatcaaaatgaatgctttttaaatcacttcctaattttctttattattttatttccatttggaaagtagtaatttatttttgaattctcttcaaaaaacctttctttaatttgcgccaacatattatctttagaaacttttccaggacttaaaataaattcacctgaattccccattaaaagtatactccacccatcttttaccccctcataatattcagggtgctcgctcttaatttcttctagtttttcttcctcttccatagttaactcatctggatttacatatgcatgaatgaaataatccttttgttcttccctaactaatcttccatagtcatttatttcaaagagccaaaatttagatctagatgtttcaaaatttagtatccggtttacctctttagtaccaaatggtggttttctaactgaattaaacagtcctaaagtggaatgaacttgagtcgcctcttgagcacctaaaccagaaaatccatttcctgcactacctatccatttagttctttgatttagctcttttccttcgactctttctctcgtaatttcaaataaatcttgttttactagaggccagaggctactaactatatcatagtcttcatattcttgtggccatttgtcaacataaatcattatcggaattgaatcgtgtcgcaataaatcatgcacatcaaatgtattacataacttaaaacttttactttcaataataattgattcatgtgttacctcaatatgatcagctgacattagtttacttaaataaagaattctttctttagaacttaatctcttaaaactaatattgtttctaatttttaatgtgttagaatttacaaaatcaaagagttgcgttggttcccccagatattcagacaaattaggtaacataaaattattgttttcattttccgataaaatggaataatcaacaaagtcaagaataaacgtggacaatttagaaaaagcataatttaaaatattatccttttgagtattttccattttatgagtatcaaaatattcatcaattttatctaacaaatcttttgcaactcttccttcaaggctttgaatatccttcactaactcatctgaaattgtggtaattgcatttctgtctacagataataaaggacgtttatccccaaaaaagtctatataaatcgaactcgaattattatattccctactataacgataattacttatattctctattattttggtatcactaactactattccatcaaccattatacctgtacttctacttaaaacaggataaacatttaacaaatcagatatattttcttggatattttgcgaaggcaacgccagcggaatttcaaattttatatactttgactccacttctacattaataaaattaacattttcgtatatttgttgaagtttaaccaatttttcaagataacctttattatatctgccatcgtaaatagctttacttaccttttcaaaatctatttttcttaaatcaacaggatgattatttcccattaatttttcagttgcattattatcaaatttaatatatataggaattaacttgttaggactagctaccatctcatatatcttataataaagattatcagaaatatcctttctatatttctctttgtctaactgagccagaaacatagtttcttcaatattttcaatatacttgttatttaatacaagatcatcttgaagataaatttttattaacgttccattacttcctataacttctctatccgcatcttccatatatctataatagaataattcatggggaccgtttatcataaaacttatatactcatcctgtttagaatatgatgattttgtacaaacctcaatctcatttcctaacataaagcaagataaaataccgattccaaattgagaagtaggcttaaaatcagtattccataaagcctgtttttgttgaaattcatttgacttgtaaaaagaatttcctatttttaaaaagtacctctcaataatgtcttttgtcattccaataccgttatccatgcaatataagtacttacgtccatctctaccttcattaattccaaattcgattctaccttcagtaatatccttatttgccaatgcacagcggcatgcatctaatgcattttgatatagttctcttaaacataagtattggtccttatatagacccacccccattaacaactcgattattttaacttgatccaatgtaaatttcatattagggacaggctgaaatttttctgaattataatcaatcccgcttctatttacattatgcgcaagttgcaagtcataaatttgactatcggctttctgattaatatctgacgacatactacctaagaatagatagtaattcgcaatctctttatctatccaatttaaataatcttgaagaaaataatagagttttggattttcaaaataaccggaaaatgatatctctctttgaccttttgcattaaaatccgttaaccaataatctaccccttcttgcttaaccttccaatgtaataaactaatttgattatcaatcattttagatgcctgaagagacttaggcgccctctcatagctaaaatgtattacatccgccaatctcaacattactgttaagaatttgatattagcataatttccatttacgtatctgcttttcacttcataattattgacttctgaataatctaatccatgccctaagcaaatttttgctaaatcctctgcgagcttcccgccccatgttcctcctaaagaatcttgaaatttcgaagttagattcttgcaattcttttccgaaaaaatatgatggttaattcgaataaattcatatcttaagttgaggctctctcttttatattctttgagatctcttatttctctaagtgaacttttgtacccagacctaaaaacctgataattgcgcacctttttagccaagttcgatataaaatcttcttcgttattctcaataaatatataattttttatttttgcaaaatcaccgtaaatagtttgagtattctctaaaataaaatctttagcttcaatgatagaaaaaggtttctttaaatcactattcaaattcatatccaagtcttcatcatataaaggaaattcatgactcccttcaatcattttaaataatttcacttcccattcaggcattgccataccagtatcatgcatatatgccgataatcctaacaaaaagaattcatatccagtaaactggtttgctttattttgagcatctattaaaacaagcatattttgcaagattttttctgaatgtgaaccatcatgaatatcaaaatcaggcaatgtactagtaatatttttcaaatgattaactatatctggtttcagcttttcatatagaacagctaatttttcattatcgtttccattatcttttccatcttttaaaatatcaataaaattcatcttgtcctccactttataattagtttactaaattgaaaattcttgaaatctttctaatatatttttattgagtataaccacgattttaggaaaaatttgtttccttatctttattttagaaaacatcctctttcatgtccatttattgaaaaaaaagatggtacaaaatgtattatatataagtaccgtcaatcattaccttatgctatttattcaaatttatttttcttacctttgtttaaatatcttcctaaaatatacaaaatgtatattcaaattaactgctttattaaaaaagtgacacgtttattaatcaaaaagagatatgaattccttatttagtttactcgataaaatgtaagcactttaaatactatttacaggctacggaaatcatctaaaagtgattctttaagttggcgtttattaatctccacaatcttttccgatttagtattaacaacagagctgttcaaatccaaaaattcatctgctttcaaattgaatatgttctgtagagcttccttaactacagaatcagcttcttctcccactttcattaaatttctaagctttggatttgtaacagaaccatttataaacatctgataaattgtttcttgttgtaactttattttcttttcaagaattgcaataagtgcattttttttaattaatttgtcctttaactcacttaattctttctgtaatacactatagttctgttgacttatctttaattctctttggtaaggaagaagttgtttcaatagttgttttgaatccttaacattctgttgtacaatatcctctatccttggtaaatttacttgaatctgattattttgcgctaatgttttatgaacaacagtattatattcctcaattaattgaaatccccttctttctgatcgaacccaataattatcagatatctcttcatttagccaaggaagccccccttccatataaaggattttcgcatatttacttaaagcaatcttgggaacttcagatttaattcctttctgttttacaaaactcaatataatttttcttatttcatcctctggatattcttttttctttcttcctacctttcccatgttacaaccaaccttcataagttttataaaatttatcgatattctgtaataaatccctcaattgttttgaatttattgctaattcccttgttagattgggatttattttattataagtatcgctaactaatttcagatgtagattaagcaatgttttatataaggtgagcacttcctcttgactctctttcatccatctttcgataaattcccttttttctaaaaattcatcatactcaattctccaatattcgaagcaccggaaacactgtgttttacaatcctttattagtgctgtacaatagccaatctcaagcttgtcccactcctgtttcgaagtttttgctggtgaaaatataaatctttctctaaataattttccaatatgccctgccttgcgtgaactcccattaaaaaaaactgaattttttaacggttgacctgtaagactaaacattttaataagtttagatatccctgaatctgtaagaaaaaactcatgttgttgatagtgacgttgtgagtatattgtatcgtgtccccctaagcgagctatctcaataggatggaacccttgtatcattaaggataaaaatgcaagatgtctagtatcattaggtcttactcggcgttcaaaatcaaagtttaccccattaattctgccctgccttatttctttttccgagtcttctccaatgcttctaactgtaaaattatatggtggtgcagtaattaccttatcataaaactcatgaagaagatccctgaaaatattacatctgaatatatcaggatttctacgtaatatcggttcatttaatatccccttatgtgctctataagataagagagtttcagaatagccgaattcctctgtcatttctacatattctttaaccatggaataaatctttttcgaaatttccaattcatcaattactttttttccaccttgccccctattttttattctaggtaatttgagatagtatctatcatcttttatatatatacaattcctctttaaaagaagaaactctccaattcttattggaattactgatgtcaaatgccaccaaatacgtattggataataatatatatatctctgactatcactatttgtttttataaaaaaatcatttaaaacccatgcaaatttaaggaaatccttaacagtaggaataactcttgttcttggcttaacagacggaatagttgacaaaaaattcagatacccttcttttccttcaaaattatcatagtaattataaaagttaaaaatagctgaagctatagtagctcttactgtttctcctttggacaatattctttgagtaaaatcttctaataatgctattctaaatatatttgtttttatcacttcatctagtacatacttgaaaatagcacttacagtactgaattgatacttaactaataaattagctgcccaacatttcattactattgttaatttttctacttctgatacagaacatccactcaattcttctattaatctactgaaacgaagataaaacatattatctctttcttcatcatataatttccatacattttcgtaaaaattaatttctgtaaacttatttttttctatagtttctaagttttcgatagaaagttccatgctaagttctaattcaaatgcttcatcacttaattcttcaatctcaattatttcactcatgttttctcacctcacctctttgtggaatatatcgtgtaatagaaggtaattgtattaagagagactcaaattcctttttactcatataaaaaaactcatatataacggatccaaactttatttcagcttctttaaacaactttaaatcctttaaaaaaagaattgcatttctttcaaaatctcctttgtatccattcttttcagtatctctaatgaaaaagctgatatgtttgagaatgcgttcagtaatcccggataacgcataaaaattataaatagcaaaaggacaacttatacaattctctcgttctgtatacaaacaattgtctgatgacaataaacactgtacatgtcttgttttagaatgcaacattcccatgtcaagttcattaataatacgacgaatttcctctccatcaaggtctttaataaggctttccacagcgcgttcttgctttgtaagatataataaagcatctgctatcccttctaattttaaatcttttccaaacttatcataaataatgttaatttgatgggttctttcatcaatattttgtgtggatccaaacaaaatgttagcaaatccatctgctataaatccaaaataatctctagtaaaaatttgagtactcagaaaatttatatcttgttgatttatatgaatgtatatatttgtggtttcaatcgacttatgattacgaaggaattttaaaagttctaattcatgcgcaggacctttttgacttttaattaaattataggcaagtgttataaaagttctattcatttttaatgatgaaaatttaaggttttcatctggaaatgtatcaaaaaaagccttataaggataactagtgagctgccgatttttagattgaaaatcaattaacgaatcacttaaaggattaagaattcttgctcttatttcacataaaactgctgcatatgcaataggaaggattaattgctccgaacaataaaaataacgatttgcaccagttttagaatgctttaaattcttaatttgaatcttccttattattttcttggcatcttcaatacttaactcatgattctgaatccactctatactgtcaacaatacctgttccctcaaaatttattctaggaatttgcatacagtcccaatgtctccaagcattatttaaatgtaccaatgtatacaaccaaactgattcatagcgattataaaaggcatttcttgaattattttgtaaagactttaataacacttcttttacgctacttacagctttttctttatgaatatctagattagaaatatatttaaaaaactccataaattcttctaccgtataaatttgcggcgctttcttcttcttactccttctcttatacggactatttatgttactaattgtaaacattttcttttgtaaagcatatccctccatttgatcaatttcccttaaaaatatataaagtatttttttcactttttctttggtattattattaaaaaacatcaaattaagctctttagaggagtacataaataactccttatcaataatcctctcagttaagaccctcgtaacagaaagatactctaacaaccttgcatttttcgaaacaaaattcgaccctgagtaagattctgatttaagccttataaatttaaaccacaatctctctgtttctttacaaaaaccagaaaattccacatcttccgcatttaatctgtacataaaattatcatatatagaccccctatcaagataaaggtttaaatttttattccgtcgctcatattctttaataatgtcctcttttaaatataaatatctaccattaaaatatctaggaattcccctcattaataaaggtatctccattgtctgtatacttatccgaataacatccacgtttatattaaattcattcaaaatttcctgtctagtatagtactttaaccttagctccttatccatttcctctttttccttttttaatgaaaaaatttcttcttttctaaaaaaaacatgtctccctattttctgactgatttttaacaatccttcttctagaagttttttataggtatacacgtttaaatccaataatttaagaacatcattcaatattattaaatccttgttcgatatatttaatcttattttctctcctaatgttttacttctatacttcaaaaaatttctaatatccttcttattgcaaaatgtgaactccctttttcttataaattgtatctttcttatattaaaactattgattacaaatatcgcttgagtatacccaatacctgccatcttcataaattcatttatcgtcacatatttttccaaaacatcaattacttcacgctttctcacatagcgtttcgcatacctatattcctcttgattattcaaggtgaataatgggtatttcagtgttcttaagtatatttgaccttctttagaaagagaaacaaggtttttataatatgcatttaataaagatctgttgtcaaggttttttagtcctacgtacgcccaaaattgctttgtagtaaaatattctttgctaaattttctttcccattgcatatgtttgtttaaatcttctctatgaataaaaaccttttcattcttatattcaactctaataatatttttttctacaagaaaccttagactgttttctgttagcttgtatttcaaatgattcaactcaatatattcttgaaccactatttaatcccccccaattactaatataccgatcatatacctgtctcttattaaaagagtcctcataaaaaccaatatcatccataccctcaccatatacactagaaagaacatttacgtgttcttgtaccttactataagaagttctcttctcgatatattccaatgttgcagttaacgttctatccccccttagattagcaatctcctcaatactcagacctaaatcaataagaaaattggtaaaaacacctctacctatatgcgtggaccaaggaagacctgttaaaaattccaaatcctcgtaacggcgatttattctcagtttttccaaaaaacgttccttgattcttaaaaatcgcttagcatatccagtaccacttaaagctagtcccgtacttttagaaataaataacgccttactttcattacttttaaattgttttttcagcttttctaatcgttctatatgaatgtgataagcctgccatagtttctcatcatctaaaacaaatacttctctaggtctcttgacttgcacatcatacctagatgataagtgcttgaataaatgttcttgattatcttctattactaaccacatcccatcatttcccctaaatcctttttcgtagatagattctcttgtcaaattataaatgctaacttaaatatgtacattaacgcttgaataaatatgtacattttcatttcaattaatggaaaaccgtagagtttctatccttaagttgatgggcatgtaaggtgacccctattagtggtcaaaattttaaaaaaacaaggaggctgtccagacagccccctcgtttttttcgatattctaataaattgcatatacacttacattgaatgggtctgcagcgtttctaggattagcgatataaagtgatctcgctgattctacagttgttctattaccattcaatacagcggaaaaaatgataggatccgtaccactagatacatccttcataacattaaaactaataatatctgggtttcctccatcagttattacccattttaaatattgtgttccaactggaagagattccgtactaaaatttccacttgaacgattgctttgtccttctaaaggagacgtttgtgataaaacagttgcaattaattgttccggcatattaattcctcttttcttaataaatttatattaattttttataacaatgattcaactcaaatatatgaaggattaaataaaataagtattgagaaatattttgtattagggaatcgttttaaaaatgggcttaacgttgtaaatccgcattttcctaacgctccccctaggggaagcgttaggaaccgtgccgtgaagtgtaaagtaatttacagaaaatgtaatacgtgatgcatcgacagttgcaaaaattaacatttatgcaacactccacttgggcttgatttttatggcgccataacgttgcatatattgtgttgcaaattaattttcgataatacggtgatatttgtagcgaaatagaaaatagatatttgcagcactatgaataccttaacgtgctgcaaaatgattacaaaaaacctttttaaaaagtgcaccgtacactttttatccttttactggaatctactttgcacttcccagcacaggtgccccttctagcccttgaaagatcttcaatatatacaaggacacctcgctcaaattgaacgggtaaagaaagcatatcaagagagcaaagtgacctattaactaacgaaagcgtcacttccatttgctcgtttattaaggttattagtatcaatttggccaaacattattccaaagctacattaataaaacacacggcaagcttatgggttaataattaacacacggtcaatttatgcttccgattcggttgaataattagatgattatctacaaaaataagtgttttctggccaacttatgcttccaactgcggccaacttataggtaaaatgacattgtatgatatgaaccataactttgccaggttggcgaggttatggttcttttttgtttctggaaaggttatagttctaaaaatagaatgtatctaattctttggttctttcacttacatcctcaatgtatcttgtgtgttatcccttaatgatcacaattttatcccgtcaaagcccgattggtgaggactgataattagtggggatgaacatctctgtttgattaattaatacttcattttatttgaatctccatatgttttgtgtttttatccatacctattgtaagattatatagagttctcctaataaactgttttaatggattatttaggggttttaaatttataaatcttaaattgttttttcgggataattttttatctaaataatttatattgaagtagaggtgaaccatcggtgaagcaggtgttggtgattaaaaatgaacggtcttcagcaaagaaaatcgtaagcggtttaacgcaagagggccatttcattttaaaacttcacaatgaaaaccaaggtttaaatatagcatatgagcaagattgggatattatcatattggattgggattcattaagtatatcgggaccagaaatttgtagacaaatacgacttgttaaaacgacaccaatcattattgtgaccaacaatatttctagcgaggattgcatagcagggttacaagcaggagcagatgattatattagaaaaccatttgtgaaggaagaattagtagcgagagttcaagctattttaagaagaagtgactataaccagcaaaatgagacaaacttttttcagtttaaagatctctttgttgatgcatctagcaatattgtgaaaaaaggtggcaaaaatctctcgcttacgaagcgcgagtacgatttacttgtatttttaattaagaataaaaatacgatattaagccgtgaaatgcttttgaatcaagtttggggatatgacgtagtagtaaatccgaatgtagtagacttatatattgggtatgtaagaaaaaagctaaagtgcgagaagaaagatagatatattcaaacgatacatggcagaggctattcaatggttgaatgataaaaataagataataaagtagtttctgtgaaatattagttattactgcgcgtattttgtaagggaaggtctctgtcccgtattcgttgagaaagtatttaatgaaggctaatcaacagtcctgaccgcacatattactttttatgcttgattttatgaattgatacgattcacaagattttcacagaattaatgactatactaattaacaggatgttcaaatgaaaatgattatcaatagcgattcaattgaataaaagttactttctaattcaatctatggatgtcatcattttcgaaataaatcacactataaggagtatacatatgaaaaaatctatgcttttaaaattagtgagtattctagcaatttttactttaatgttagtggcttgctcagattcaagtaaagaaacttcgaaggctaataataaagataatggtagtgataagccaaaaacggttgaaatcactgatgctcatggaactgttaaagtacctgtaaacccaaagaatgtagttgctttggataacagaacttttgaaactttatctgattggggaattaaattagcggctgctccaaaggatatcatgcctgctgattcagcatataaaaaggatgaaaaagttcaaaatattgggaatcaccgtgaaccaaatctagaaattattgcagcggcaaaccctgatcttgtaatcgttggtcaaagatttgctgatcattatgaagaaatcaaaaaattagtgccaaatgcagctgttattgatcttaattttgatgtttctgagaaggctactaagcctggagaaaacttagtaaaaggacttaaagattctacaactactttaggtaaaatctttgctaaagataaagaagctaaacaattagtagctgatttcgataaatctattgaaaaggcaaaatctgcttataacggaaaagataaagttatgagtgttatcgttactggtggaaatattggctttgctgcgccgcactctggtcgcgtttggggacctatgtatgaaattttcggttggactccagcattagaagtttcgaattctactgcaggtcataaaggtgatgatgtttctgttgaagctatcgcacaaacaaatcctgattggcttttcgtattagatcgtgatgctgcaacatctgatgcagctaagtcaacacctgctaaggatgttatttctaaatcaccagctcttcaaaacacaactgctgtttctaaacaacaagttgtttatgcaccagaagatacttacacaaatgaatcaattcaaacttatatagagttatttggaaatcttgcaaaaactttagctaagtagtgtaaaggggtacgaaacagtgtcaaaaaatatgatttctagggttgagaatatttctcaaccccagttttataatcacaataaaatatggacaaaaccttttataatagcggttatagttgttataattttagggattatatcactgtttactggagtttatgatatacgtggacaagaggacggaatggagatgtttttcatcactcgtgttccgagaacagttgcattaatgcttactggagctgcaatggcgatggcaggactcgtaatgcaattaattacacagaatcgttttgttgaacctactacaacggggacgattgaatggtcaggcttaggcctgctttttgtgtatttattatttcctgccccaactttagttcaaagaatgactggtgcaatcattttttcttttataggaactatgattttctttctatttttaagaagagttaagcttcgttcgtctttaattgttccgattatcggattgatgcttggagcagtaatttctgcagtgtccacttttttaggactcctttttcaaaagacgcaaagtattgaaacttggtttgtaggttcatttgctaacattcaggtgggaagatatgaatatttatggctgattgttatcattacttttcttatttttatgtatgctaatagattgactttagctggactaggagaagatgtcgcaacaagtcttggagttaattacaatagaattgttctttttgggactgctcttatctctgttgcagttggaattgttgcagctgttattggacacttacctttcttaggattaattgtgccaaatatcgtttcaatgtttagaggtgatgatcttaggagtaatttaccttgggtttgtgtgatcggaatgggatcaataactgcctgtgacatcatttctcgaacaattatacagccttttgaattacctgtttctttaatacttgcaacagtgggagcagtcgtgtttattactattttattgagacaaagaaaaccaaggaggctacgatgatcacattagaatatagaaaaaaagaaaatgtcgaaatcgattctagccttcataatgaaagtagatcagctagcgcttttcggtctaagaaggaagcaagacgttattggattttactcataacattgattgctttaggtcttctttcttcatatggacttttagtttataacaatccagttccgatagattcaccttcttttatcccagtcgttaagagaaggatagtagctattgttgcaatgattattgctgcggtttgccatagcttgtcgacagttgctttccaatctattacgaataataaaattattactccttcacttttaggtttcgaatcactttattcagcaattcaaacgagtacagtattcttctttggtgctagtgcgttaataaattttaatggaattggatcatttttattccaagttgttgttatggtcttcatgagtttgatactttatggatggttactttccggtaaatacgggaatttacaacttatgcttttagttggaattattattggtaccgggctaaattctgtgtcaactttcatgagaaaactacttgcgccttcagaatttgatattttacaagcaagattatttggttctgttaatcatgcagatcctgcatattttcctattgtaattccgatgatcataattgtagcagtattaatttttgctcattctaagaatttgaatgttttgtcactaggaaaggatgttgctacttcttttggagttaaatatcaacctagtgtaatttatacacttgtattagttgctattctgatgtccatttcaaccgctctaattgggccacttactttctacggctttttagtagcaactttgagttatcaggcggcgtcaacttatgatcatagatatattttcccaatggcttttgctataggatttttaataatgacgagcgcatactttttaatgtatcatgtattccatgctcaaggtgtagtttcagttattattgaattatttggtggaattatattcttaactatagttttaaggaagagggctttatgataaaaattgataatgttaaaaagttctatactgataaggtaaaaataggacctttggatattgaaataccaaaagcgggctttacttctttaattgggccaaatggtgctggaaagtccacgacacttttgatgattggtagacttttagatatggatgaaggccaaattcaggtagcaaatatggatgtttctgaatccaaatcaaaagacttagcaaaagttttgactatattgcgacaagaaaatcattttgtaactaggcttacagttagacaattagttggatttgggcgctttccttattcaaagggaagattgactaaagaagatgaggttatcatttctaaatatatcgatttcttagatttaactagtttagagaatagatatttagatgagctttctggtggtcaaagacaaagggcatatgtagcgatggtattgtgccaagagacggaatatgtacttttggacgaacctctgaacaaccttgatgttgctcgttctgttcaaatgatggagcatttaagacgtgcagctaatgaatttggaagaacaattttgactgttatgcatgacataaattttgcagctaaatactcggataaaatttgtgctatgaaagatggacaaattgctgcttttggaacagtagaagaggttatggactcaacacttttgacagatatttttgaaacaaaaatagaaattattaatggtccttatgggccaatcgcagtttattagttataaaatgtgaaaaaataccgtagcttgtgtagattatgcaagctactctagttgaagttgctgtctgtattttataggcagcagcttttttatgtgactactcataaaatgcaaaagaatgcttcaccttttcaagtatgtactaaacgaaaaaaatatccctgtataactttttaaaagaattcagcttgttttttgatatgtaatattgcatatcagagtgtattgataaaagtgtaaggggtcactataatgagggcataaagataaatcacattttcgtagcaataaaaaggaggaaataatatggaaatcgcaatgacagttttaaaatttgtaggtggcgtaatcccgttaattcaagaacttttaaaagcatttatgtaagtttattagttagctatcatttatcgatcattatcatattttactaaaaaagaacggggtgatttttctgaatattaagaaaaacactaaaagaagaaagttccttgcatgtttattagttagtttatgcactattaattattcatctatttccttcgcagaaacacaagcaagtaatgcaactgatgtaaccaaaaatgctagtggcattgatactggtatagcaaatcttaaatataataatcaagaggttttagctgtaaatggtgataaagtagaaagttttgttccgaaagaaagtatcaattcaaatggtaaatttgtagtagtggaacgcgagaaaaaatcacttacaacgtcaccagtcgatatttcaattattgattctgtagtgaatcgcacgtatccaggagctgtacaacttgcaaataaagcttttgcagacaatcaaccaagtttattagtggctaagagaaagcctttgaatattagtatagacttaccgggcatgagaaaagaaaatacaatcactgtccaaaatccgacatatggtaatgtagctggagcagtagacgatttagtatctacttggaatgaaaagtattctacaacacatacgttacctgcaagaatgcagtatacggaatctatggtttatagtaaatcacaaatagcaagtgctcttaatgttaacgctaaatatcttgataacagtctaaacattgattttaatgcggttgcaaatggagagaaaaaagtgatggtagcggcgtataagcaaatattttatacggtaagtgctgaactacctaacaatccatccgacctttttgataatagcgttacttttgacgagttaactcgaaaaggcgtaagtaattcggctccacctgttatggtttcaaatgtagcttatggtagaacgatttatgtaaaattagaaacaacatctaagagcaaagatgtacaagctgcttttaaagccttacttaagaataacagcgttgaaacaagtggacagtataaagatatttttgaagaaagtacctttactgctgtagtattaggcggagatgcgaaagagcataacaaggttgttactaaagatttcaatgaaatccgaaatatcattaaagataatgctgaattaagtcttaaaaatccagcatacccaatttcatatacaagcactttcttaaaagataattcaactgctgctgttcataacaatacagattatattgagacgacaactacagaatattcaagtgctaaaatgacacttgatcattacggtgcttacgttgctcaatttgatgtatcttgggatgaattcacatttgaccaaaagggtaacgaagtactaacacataaaacgtgggatggtagcggaaaagacaaaacggctcattactctacagttatcccactcccaccaaattcaaaaaatataaaaattgtagcaagagaatgtacaggtcttgcatgggaatggtggagaacaattattaatgaacaaaatgttccattaacaaatgaaataaaagtttcaattggaggaacaacattatacccaacagctagtattagtcattaagtataaaacaagcgccctataagtagggcgctttttacttggtcacaaattttattttgtatcggtatgtttttaagttttgtaaatcatcaactataaggtgggaatattgtgcagacgaaaagctacatgtttttcgtctttttgttctcttgcttaataagaaagatcctgtaactcagtacaggatctttaatcaaacgtttttaaaagctaaattgtggtttcatatcacctttataaggttcatgttcaacgaatatagttatatccttaccagcttggtctttaccagttctcttatacgtaaatttattcttatttagttcagtaagttcaagagcagcaccgtatttgttatttccaattgaaacatgggctcttattttattttcgtgtacaacatcgaagtagccataatcaccgcggctttgacctgtttcgctattgaagaactcatatttattagatttgtcatcaaattttgctagacttataaaattcgaattaaactgtgttacatcgttaccagtttcgtctaatacctttgttccgtgccaaagggtaccgcctaaaattttatctccatcaacgtttttaacaatatctcctgtagtcgtgttcagctgcttgtccggatcagtgaaagaaagttctttttctttatatggaacatgttcaacgaaaacttctacatctttaccgttagcgtctttccctattcgtttataagtaaatacatttttatttagttttgtcatgtcaacgacagcttgatacttcattgattctgaaattaatattctctttttcccatcatttgtgataaagaaagttcctttatcgccacgacttgcacctgttttagcatcaaaaaattcatatctgccggacttcgcatcatattttgcaagaccaatgaagtttgcattctcttttgttaagtcattcttatctttgtcatacactcgtgtaccttgccaatttgtctcgctaagaatattagccattttttgccctttagttaatttattttccttttttgtttctttagcaacttgttcttgcttttgtttcccatgattttcttcagctttagtaccagcacaccctgttaatgctaatgtgaatccgagcagtacggatgatagtgcttttgtttttttgttcatgttttatcgtctccttattttatgatttcaagtagtacggttagcgattatagtagcagtgcgtcatatataaacttaattgctacgtttcttatgttaatccccgactataaactgcctctaaataaaacattaaaaaaagataaactaattcctaaatttttttcatacttataaaaaggtcttttacatggggggaatgtaaatttcttattttgaaaatggcgtaatcacattggggtatacacattatgcttacattgcgattttagatgtgatgttatactgtgtataagattttatgtgtgtatgttgtgtcggtttttgtcggtaagttgatatatttcgaaaatcgctgatatatttggagttgcgccgatatatttcgaaaatcgccgatatatttggagttgtgctgatatatttgaaaaatcgctgatatattttggagggggataaaaatgattgtgaaagagcggaaaatgcccgtatatttgctgcaattagaagctttacttagaagattgcctgctcatcatccaaaaaggaatgtggtggttgaaagtctagcgaaatttatggccggctataaaggagagcaggcgattgagtatccgctgagttttctatccgaagcagaataccatattttacatgatattaggttatttgatcaaaaacattatttccaaattgataccctcatagtttcatcttattttcttcttttttttgaaataaaaaatattattggtacattaatttttgatacaaagttcaatcaacttattcgaatagtagatggtaatacggaagaaggattcccagatccgcttttacaactgaaacggcaagagatgcaactgagaaaatggctgaatctacatgatttacataatattccgattgaagccctcgttgtaattagttcccctcgtacaattattaaaacttcagatgaaatactgtctagtaaaattatccacagtgcaaatttacctaatagaataaaacagattaaaaatcaatataaagaaaaagtgattgataatataaatggacttataggccagattatgaatgagcacattccgcaacgtcaaaatgttcttgcgcaatataaaattaaaaaagaggaattgctaaagggtgtacagtgtgaggaatgttttacaatggcaatgttaaaagaaagacagggatggcgttgttcaaattgcaatagtatgtctaaacatgctcatttacgtgctgtacaagattacacacttctgtttagtgtgataactactaatagcgaattgagggaatttcttaatatggaatctagttctgcggttaaaagactcctccaaacaatgaacatcaccttcactggcaataacaaaggacgaatatatgatttaacttctttccaatcgtaattttgctataataaataagtacttatacgaaggggagtctaaagagagtatgaagtcatttaatatcgatcatgttatagctagtgttttgcaatggatattaaatatagccttaattatattatccattgtgttatcaattttcttagtgaatgagacaattacgttcgtgcagtatattttttcggcaaaagagtatacgtcttataaattggttgaaagtatcatcgtctatttcttatacttcgagttcattgcattaattattaagtattttaaatcgaactatcatttcccgttacgttattttatttatatcggaattacggccttaattcgattaattattgtgtctcatgaggaaccgatggagacgttattatacgcaggagcaattcttgttttagttattgctttatacatatcaaatatgagagatttgagaaaagagtagtagtgcagacataagtcagcactacttttttacatcttgaccttcaagttgcttgaaagtttacaatgaaattagggcgtttgaaatcgaaaaaaattgagaaattaagtgaagaggtttcttttacttggaggttataggaatgaatcaggaattgaagttacgtccattagaacgagaagatttaaagtttgtacacgaactgaataataatgcgcatattatgtcgtattggtttgaagagccgtatgaggcatttgtggagctgcaagacttatatgataaacatatacatgatcaaagcgaacgccgatttatcgttgagaaagacaatgaaatggttggattagttgagttagtagaaatcgattatattcaccgtagaacagaattccaaattattattgatccgaattatcaaggatatggttatgcagtggatgcgacgcgtttagcaatggattacgctttttccgtactaaatatgcataagatttatttagttgtggataaggaaaatgaaaaggcagtacatgtttataaaaaagttgggtttatggtagaaggtgagcttatcgatgagtttttcgttgatggtaactatcataatgcgataagaatgtgtatgtttcagaagcaatattttgaaaacaagtagttgaaagattcggaagtaatgttgacgcttcgtaaaaccgtatgctaaaatcctttttaagtattaaggaaggtgcataatatgctttatataaaatttgtaaaactcattagaaaactttgctccgcacaaatgtatacggtgaagcgttgtacggagcttaatcaaggggtataaatcccctatattcatcggctgaataacttttctaaaaaagtatagtgtatctatgcttatttcgttatggtttttcagctggtgtataaaatagattaaggggccatagacaatgctttgtctatggccctttgtgtatattattccgatgagtctttactataaattggagtagtataggaaaaaccacgaagcagagggctagtgtcgaatgacgctatctctctgctttttttaatttcaggaaaagaggaataaaaatgagtttacttaaagtggaaagtttatcacatagttttatagataaagtattatacgaaaatgcttcttttgatttgcataaaggggagcatatgggaattgttggacagaatggtgcaggaaaaagcacattaatgaaaatattggtgggggaaattattcctgataagggagacataaagtggcaacctaatattcaaattggacatcttgatcaatacgcagaaattgatgaggtttataccatttcacaatatttaaagagagccttttatgatttgtatgcaatggaaaagagaatgaacaagttatatgaagaaagtgcgatgactggagatgaaaatcaactattgaaagcggcagaaattcaaggactgctcgaggctcgtgatttttattcagtagatagtattacgaataaggtggcagccggtttaggtattgatgtgattgggatgaatcgtgtgattggtgaattaagcggagggcagcgtgcaaaggtaattttagcgaagctcttattagaagagcctaatattttattgctagatgaaccgacgaattttctcgataaggagcatgtggagtggcttgctaattatttaatgaattttgaaggagcgtttattgtcgtatcacatgattttgattttctggaaaaggtaacttcttgcatatgtgatgtagagttcggaacagttaagaagtattacggcaaatactcagattttgtaagacaaaaggagcatttgcgaaaagattatattcgccaatattatgcacagcaaaagaaaattgaaaaaacggaagagtatattcgtagaaatattgctggggtgaattcaaaaatagcgcaaggtcgtagaaaacaattacagcgtatggaaagaattgcgccaccaagttttactcataaaccgtctattcattttcaggaacttcccatttcagttcagacagttcttgaagtaaataatcttgaagttggttacgacttcgctctcttaccaaagttgaatttttcagtaatgggtgggcaaaaacttgtcattacaggtttcaatggagtagggaaatctactttattaaaaacaatcgttggaaatattgctagtatttctggagagtttcacttttcagagcaaataaagattggatattatgagcaagatttaaattggagcaatgattctttaacgccgcttcaaattatttcagaacagtttcctaaactgaatatgaaggaaatacgccatcatttagctgcgtgtggagtgaaggatacgcacgtttcgcaagaaattcgtacgttaagtggtggtgaacaatcgaaggtgaaactgtgtggattattactatcaccttgtaacttcttaattttagatgagccgacaaatcatttggatgcagaagcgaaggaagctttgcaaaaggcgttaattaagtttaagggcagcattatactcgtatctcacgaagcaagtttttatcttgattgggcagatagcatctttcatatagagacgggattagttaagggggtgtgaaacatatgagtgaaaacaattggaaaacgaaaattatattatttttgaccgctcaaactatttcgttgttcggttcctctctcgtgcaatacgcgattatatggtatatcacccttacaacatcatcaggagtgatgttgactatttcaactgtttgcggttttctaccacaaattgcgatatctttgtttgcaggtgtttggattgatcgttatgaccgtaaaaagatgattatgttatcggatggaattatagcgattgcgacgttagtcttagcaattttatttttaacaggatataaaagtatttggttactttttattgtgttactcattcgttcagctggaacaggagtacaaacgccagctgtgaatgcattaattccgcaaatcgttccgaaagagtatcttatgaaagtaaatggaataaatagcagtattacatctttaattatgtttctttctccagcagcaagtgctgcgattctttctattgccagcattgaaacaacattttttattgatgttattacagctatgattggaattagtattatgtttgtcattcatgtggaaggacatgtgaatgtagaaagtaagcaaaaatctaatctacaaggaattaaagaagggttcacttatttaaaagaaaatgtatttattaaaaggctaatcgttttattgattatcgtcatgattttaataagtccagctgcttttttaacacctttaatggtaactcgttctttcggggccgaaatgtggagacttactgctagtgagatgacctttagtgcgggtgcggcagctggtggcgtattgattgcagcgtggggtggttttcgtaatcgtatgcatacaacagcgctagcttgtgcattatatggactgcttatgattggactcggaatagcaccgatatttattatgtatttagtctttaattttttaattggtataacaatgccgtgcttcaatacaccagttactgtgttattgcaggagaaagtagaaccatcaatgcacggacggatgtttagccttgtacaaattgcgaattcatgcgcgcttcctttaggaatgataatatttggtccgttgtcggatatgtttagtgtagagattttgttaatttatgctgggatattcgtgctattttgcgcaatgtatattgtattaagcaagaggtttgaagtgtaaatatttataatttagaaggtttgcgaagtgatttaagatgctttgcaaacctttttgttgtttgttcagtcaataattatttattgtttaacaataaataattattgactgttaattcttttttagataatatgatggtaagaatctaaggggaattacataagtagaggagaatgtgaaatgaaaaataaatacgtagtagctatttctttcatgattttagcgattatttctttaacgatacatgcttcaaacagtaaagtaggagcggatggatttcttgaagaacctttctttttcctagtaccgataagttatatattgttccttagtggtattggtatattgctatttggatttattacttcaaagctgaaaaagggcaatagatagggacaaaacactcactatgaaatagaaacataccatatggaagaaaaagaataagtgagatgaatcatgatgaatcattatttttataatggtagacaagtaggagctgctattacgctggctggggcacaagggacaattcatgctgtgaatcaagctattcaaatgcagcaacaagcatattttgcacaaatgatgcaaattcagtatatgccgtattcacaacttccgatgcaaattatacattacgatgtacatccagctggtttattttccattccatatggcgggacatatttcttatgaaagaaagcgactcaatagagtcgcttttttatattccgcctaacttcattccaaggaaggcaaaggcgataccaattatgtaagtagcacttaaatataaaaggaagatgtatagttttttacgattgagaagctgaacagattctaatttaaacgtagaaaatgtagtgaatgcgcccataaatccagtacctaataatagttgccagcctgtagtgactccgttgccaattatatacccaagtaaaaatgcccctgttatattaataaggaatgtagcaattggaaattgtgttttatttcttttcttaaaccaattgctaattgcaaatcgtgtaatcgcaccgaaaaatcctcctgttgcgactaataaagcttctatcatgagtaatcaccttctgtaagagatttcttaattaagaaatctccaagtgtatagccaaggccagacataatgaggccaccaagtatgctgcatgatacatataagaaggctatgctccactcagaatgattgatcaattgcacagtttctacactaaatgttgaaaaagtcgtaaaggaaccgatgaatccagttccgatgcctgtgataacctctgaaggtaagatgtttagccgagcgatataagtagttagccacgctaagaaaaagcaaccgattaagttaatgagtaatgttgccaatggaaatgaatgatgccaaaatgtgttgatattaagacctaaataataacgagaaagagctcctaatataccagcaatgccaacgataatataaatcaattttctcacctctttaaatagcttgctcaaaaaaatagactcctaccagtatccatactggtaggagtcattagctaagcagcgtttatggcgaactccatcgcctatgattattacatatagtgtactaaatataccgtttaatttccagtgaggaggagggtgtaacttttctttttttgatgtctgaaggctttttaagtaattaaaatgggatcgattacttatcaactaaatatagtgatatacggttttaattatgataaaatgtttcttatgtgtgtcgttttgttttatttgactgaaaataaagaaaaataaatttgcgtgaaaaggagtcatttatttgaagaaatttttaaaaatcgtatttacatgtgttttagtagtagcgggcattgtaggaggatttctagcttatatgacacttactaaagaacagcctgctgatgttataagcttgaaggtagagaataataaggagcgcgtattagcgactggaaatgagtttaaagttacaacatttaatattggatatgctgggttagataaggatcaagatttctttatggatggtggaaagggatctggttcaagtagtaaagagcaaacggaaactaatttaaagaatatgctttcgtttttacaaaatgagaatagtgattttgcactattacaagaagttgatataaagtcacttcgttcatttgatgtaaatgaacatgaatttttgaaaaaaggattacctgattatgtttcgtcatttggcaagaactacgatacgaaatgggttccagtgccaataacaaatccaatgggatatgcggaggctggattaagtacgttttctaaatacactgttcaagaagcgaagaggttccagctgcctggaatggagccttggccaaagcgtttgtttgatttagatcgagcaattgtggaatataaaattcctgttaataatggaaaacatgttagactcgtaaatttacatttgtctgcttatgatgaaggcgggaaaattagaaaacagcaagtagagtatttaaaagaatatatgaacaagcattatgaaaatggtgattacgtaataatgggtggagattggaatcaattggtttcgaacgctcaattaagtgatccgaagttcgtgaaagagcgtcctgagtggttagtagagttaccgaaggactttacagacggtggctttaaatgggctgtagatccgtctgttatgactgtaagagatgatgtaaagaaatatgtagaaggtgaaaatttcgtcactattattgatggctttatcgtttcaccgaatgtagagattgtaaatgtacaagggaaagatttaaagtttgaaaatagcgatcataacccagtaagtgcggtatttaaactgaagtaattgatatgtataagtagaaggtggggcttcatatggagtggttaaagaggacttgtttttctaaccttgagaaagaatcacagaaaaatcatttattactgtttataacgatttgtagtttcttccttgggataatcgcaattgggtattatggatatatttttacagagagagccatagcattttggatttgtggtatttctgtcgttgcatttggaacgctttttacttttataaaaagtatggaatcagcgtataaatatatcatgacatttatgttgcttacaatgtcttacattatggtacaagcttttaatgaaagcccggctgtatttcaaatggtctattttacattagctgtttcacttatttatttaagcgagcgcctcattttaattattggcggggtagctgttgtgatcacatttatcctttgtagctattggccggagcaattttttgcttatacagcctcatctgaagctgctaatttcgcaagtttgttagcgattgtaacaatcgctatgtggggcgtcacgaaaatcggttctaatctgctccttcgtttaagtgatgagaagcaagaagtaatgagaaaagctcaggagttagaagagacgcaaagacttattgaagaaacagttgtgaaactagatagtaatttcaatcatttaagacaaaatatgaacacgtcgatggaatcgatgagtgaaattaattttgcctttgaagaggtggcagttggtacgcaatcacaatcagagatgatgtatcgttcggtagaagtattgaatgatatggagggaaatattgagcaaatcatctctcaagtaagaactgcatcggctcatgtggatgaaagcttagaaatttcaaaaggtagtgtacatactctaagaaattttgaaactaacatgagaagtttaaatgatgttgtttcacagtctggaattatatttagagatttaatgatgcaatcgaaacaaattaatgaaattgtagatgtaataacgaatatttcaagtcagacgagtttgctagctttaaatgcaaatattgaagctgcgagggcaggcgagcatggaaaaggttttgctattgtagcgagtgaagtgttaaagcttgctgaagaatcaaatcgttctgcgggaagaattcaagggattttgaaggagtttagtaatcaagcaagtaaggtagaagtgcaagtagagaagtcagaaagagtacaagaagaatgtaacgagatgttagcaagtgttttaacaaatgtaactgatttagggaagtttattgatgcgattaataaagtaatgcgagaggttgttgttcatcaagaaagtttccaagttaaaacgacgaatattgtaaaggatgttacgcatgcttctaacgtaattcagcaaacttctacagctacagaagaagtgctagcgagtgtggaagaagaaaaacatcgaaatgatacgtcagtgaagacgttacaaactgttagcgagcaagtgaagttgttagaagatattttagaaaagtaatattgcttagaaagagcacgagtgatgtgctcttttttcattgaaacgaatacttgataggaatttaattgcttttctgcgcgttttctgccaagcttaaggagataaagtgagactagtacatactgattattagccctcaccaatcaagctatccgcaaatagcggaataaaatacttcaaagaaagaattatataggtgacgcatatgatcgaagttaagacttctgaacttagtgatggagaatttaatagaggtgtatttgcaactcgtgatattaaaaagggtgagttgatacacgcagcaccagttatctcttatccgaatgaacagcatgaacatattgagaaaacgttacttgctgattacgcatttgagtatggaatcaatcatacggcaatccttttaggatatggtatgttatttaatcattcatatacaccgaatgcaacgtatgacatcgtttttgagaatcatacatttaacttctatgcttataaagatataaaagcaggagaagaaattttaatcaattataatggtgaagttgataacgatgagctgttatggtttgataaagaaaaagaagagaacgaaaagtaatataaagagtatagaaagagcacattctgtgggatgtgctcttttttattgatgtaaataaagtaaaaagtacaaaaaaataccactttctttttgtgtggtatagtaagatactgagggatagtgttttgaaaaagtcatatattttacaaattgttgtctttctgatgacatgtcaagtttagtagtccatttgggttgctttattatgcaatatatattttaatatgagtggcacctcttataaattaagaggtttataggtgtctcgaattgattttgggtacactgtatccaccactttaggttttttcatgtacgtggggatattatgggcccgtataacgggataaaatgaatatagaaatagaggaatcgtaaaatgaatatgcaagaggtttataaatatttaagtacggtattgcctgaaggacatgttaaacaagatgaaatgttaaagaatcatacgcatattaaagttggcggaaaagcagatgtttttgttgcgcctacaaattatgatgaaattcaagaagttattaaatatgcgaacgaatataatattccagttacgtttttaggaaatggatcgaatgtcattattaaagatggtggaattcgcgggattacagtaagtttaattcatattacaggtgttactgtaacaggaacgacgattgtagcacagtgtggtgcagcaattattgacgtatcacgtattgccttagaccataacttaacgggtcttgagtttgcttgtggtattccaggttcagttggcggagcattatatatgaatgctggtgcatacggcggtgaaatttcgtttgtattaacagaagctgtcgtaatgacaggtgatggagagctacgtactttgacgaaagaagcatttgaatttggatatcgtaagagtgtatttgcgaacaaccattacattattcttgaagcgagatttgaacttgaagaaggtgtacatgaagaaattaaagccaaaatggatgatttaacgtttaaacgtgagtcaaaacagcctctagaatatccttcatgtggtagcgtatttaagcgcccaccaaataactttgctggtaagttaattcaagactcaggactacaaggtaagcgaattggtggagtagaagtttctttaaaacacgctggatttatggtgaatgttgataacggaacagcacaagattacatcgatttaattcacttcgtacaaaagacagttgaagagaaatttggcgtgaagttggagcgagaagtaaggattattggagaggataaagaataacgaaatacgtatgaagatatgaattattttaaaataacatttgggtattgttgacaatttgttttcaattcaatataatggctaataatttaacaagtaacatacgttgaaagagcccagtagcagtttgtcactgttaacgagagagctaggggttgctggaacctagcacaaacaaacttgcgaattacactctggagtatcttaggtaatgctaagcggactagcaatcgatattattgctaagagtggtatgagtagctatgctatttatgcaaactgggtggtaacacggtgaataatcgtccctatgtctatcgtagacataggggcttttttgtttttaaaaaataaaggggatgacaaaagatgaatattattgatgaattagaatggcgcggcgccgttaatcagcagactgacgaagaaggcttacgtaagctagtagaagagaaaaagatttcactatactgcggagttgatccaactggtgatagtatgcatatcggacatttgattccgtttatgatgatgaagagattccaattagctggccatcatcctgttattttaattggcggggcaacaggaacaattggtgatccgagtggacgacaatcagagcgtcagcttcaaacgttagaagtggttcagcataatgtagatgcgttaacagcacaaatgaaaaagctatttgattttggtggaaatagcgaagtgaagatggtaaataactatgattggacacatgaaataaatattattgagtttttacgtgattacgggaaaaactttagcatcaatagcatgttagcgaaggatattgtagcaagccgtttagatacaggtatttctttcacagaattcacgtaccaaattttgcaagcgatggacttccaccatttatacacgaaagaggatgttcaacttcaaattggtggcagtgaccaatggggaaatattacgagtggtttagatttaattcgtaagttagaaggtcatgaggcgaaagtattcggattaacgattccgttattattaaaatcggacggtacgaagtttggtaaatcagcgggtggtgcggtttggcttgatcctgaaaaaacgacaccgtttgaattttaccagttctgggtaaatacagatgaccgtgacgtaattaaatacttgaaatactttacgttcttaacgaaagagcgtattgatgaattagcaacgaaggtagaaacagagcctcataaacgtgaagcgcaaaaagtgttagcggaagaaatgacgaaatttgttcatggagaagaggcgttcctgcaagctgagaaaattacagcagcgttatttagcggagatattaaatcgttaacagctgatgaaattgaacaaggctttaaagaaatgccaacattccagtcttcaaaagagacgaaaaacatcgtagagtggctagtcgatttagggattgaaccatctagacgacaagcacgcgaggacattaataatggtgcgatttctatgaatggtgagaaagtaacagatgtgggtacagatgttactgtagaaaattcatttgatggaagatttattattattcgtaaagggaagaagaactacagtcttgtgaaattaggataataagtaaggctggaaaatatatcggcgatttttcgaatatatcgaccgtaactcaaattatatcggcgattttcgaaatatatcagcgcaaatccgaatatatcagcgattttcccaatatatcgatttaccgacaaaaagcgacaataagaactgttccgaacgggacagctttcattataaaaagtcagtatatttagataaatttaaagggtatataatttttttgacgaataaataagttagagaaaattacggataaaaaatagcccgaaccatgcagggcatgattcgggcttatattcagattagtaagctaagctgaatagacctttaatgtgtgataagtaacgaacgttacttgcttctttcattaatgatgctggtaagcctttaagtggagtattacttgctccaattgtagcaaccgcatctttacgtcctagactagcaagtgttccagagtttacaggtgcgaactcttccaatgctttgccttctagtgctgcgtataagttgtatccaattaactcacccatttgccaagcgatttgtgcagttggtgggtatggacgtccgtctggagcgaagacaacagcgctgtctccagcaacgaatacgtctttgtgagaagtagattgtaggtatgcatcaactgttgcacgtccacggttaacttcaagacctgattcaccgattaatgggttaccttgtacgccgcctgtccaaacgaatgtgttagcaacaagtttttgaccgtcttttaagtcgatttcattgccagcaacgtttgttacaggaagaccagttaagaatgtaacaccgcgtgcttctaggctagtagttgcacgttcgattaagtggtctggtaatactggaaggatttttggacctgcttcaacaagaagaagtttcacttcttttggatttacgccgtggctttttgcaagtttaggcataatgtcagcaagctcaccaactagctcaacgccagttaatccgccaccaccgattacgattgtagcatcagcttcgtttttcgttttcgcgtattcacgaatacggtcttcaacgtgtttgtagattttgtttgcatcagcagccgattttaataccatgctgttttcttctagtcctggaataccgaagtaagcagttttacttcctaaagcaactacaagtgcatcgtaagataaagtagtgccaccagctagtttgatttctttgctatcaactgagaatgactcaactgttgcgattttaagatcgatgtctttccctttgaaaagctttgtaagtggcattgcaactgcttgctcagacacgttaccagctgcaaggcggtgtagttcagtgatgatttggtgtgttgggtattggttaatcactgtaacttgtgcttctgatttgctgtaatatttacgtacgtttaaagcggcaagaagaccgccataaccagcgcctaagatgacaatttgttttgacatagtatgatatcccccgtctttactaattgttgttataagttaaattatttattgttacgttctgcactaatttgaagatatgcgttcacaaagcggaacattttttgtgcttgtggatcttttagtaattttaacaggccgaataggccgataacttcgttgctttcttcagcacgatctttcgcttcgattgcagttgcagccatgcttttcactgtatcttttacaggttctacaagctctgtaattgcaccaacagtgtcgctttttaatacttcatcagtagcaacagtttgagcgaagtcataagacttagttaaaatgttaacaagctcagttaattttggaagctgttctactagtgttgttaatgattcttgtacctcaggttttaacaactgatcaagtacatcaagttgtccttggctagcagaaatttgtacagtttcttgttctggctttgtttgagtcatagtttctggcatctccaattctcctttacgatagcaatactcttattttttataagtaagatagtaaacgtttacgaaactttatacaaagtttcacaaaacacaataaaatgcctttaaatttatgacagcaagtaagctgcaaacataaatctaaaaccataacgtcttacttattatttatgaactgtccgatacatggcttgtccgcataatggaaaagctccgttaccggaaagtgtatataatatatatcctatattatatactatatacacctatgttaacataaaaatgattcctaattatttgatattgagtgtataacgtagtgctgacaaggtatgaaagcgtataaaatattttgttccagttagaaatgtatatacatataaagaaaaaaaggaaaaaatgaacaaattcatgttcgttttttcctttttcctattattcaccttctacaattagcatcgatgtgttaccgcttttttcaagatggcattcgccccaagtacaaagagaatcaagaatggactctaaagaccaaccgtattctgtaagtgaatattctacttttggtggtacttgattgtatacctttctttgaataaccccatcgtcttctaattcacgtaattgctgagttaacattttttgtgtaatcccaggcattaaacgttttagttcactcgttctttttgtgcctttcgttagatgacaaaggataacaaccttccattttccaccgataacctctaaagtcgcttcaacgggaatattatatttcttcatataaaaatctcctttgatgaatgtagatttaagttctccaacaaaagaagctaaataattaaatgttactaaaaagtgcctatagcactttaaagtacgtactttttatcatgttgaatatgttccataatagcatacgtaagagggaaatgagtagtacggtactaaaaagtgcctatgttacttttaggtacctatcgtacttttaagtgcgttcttcaaaaaaagagtaaagccattcataatagcgtatatcaacagtaaagttatttttgtagaagataaaaaggcctttttatcatactattatgattggatttctcgcattaaggaggagttcaattgaattcatatacagtatcttcttcggttatgcagacgaatcggagaagtatgtttgctttattagcactagcaattagtgcgtttggaattggtacaactgaatttattagtgtcggcttattaccatctatctcagaggatttacatgtttctgttacaacagcggggttaactgtttctttatatgcattaggagtagcgtttggtgctccagtattaacgtcattaacagctagtatgtcgcgaaagacgttattaatgtggattatgattattttcattattggtaatggaattgcggcggtagcaacaagttttactgtgttacttattgcgagggttgtatctgcatttgcgcatggtatttttatgtcaattggatctacaattgcggctgcgcttgtacctgagaataaacgtgcaagtgcaatagcatttatgtttactggtttaactgttgcgactattacaggtgtaccaattggaacatttatcggtcaacaatttggctggagggcctcgtttattgttattgtggccattggaatcgttgctttaatcgccaatagtatgctaattccttctaatttaaaaaaaagtacgtctgtatcatttcgcgatcaatttaagctgattacgaatggaagactgttacttgtatttattattactgcattaggatacgggggaacgttcgtaacatttacgtatttatctccgttattacaagaagtaacaggatttaaagcaagtaccgttacaattattttgttagtatacggaattgcaattgcgattgggaatatggtcgggggaaaattatcaaatcataatccgattcgagcgttattttacatgttctttattcaagcgattatattatttgttttaacatttacagcgccatttaaagtcgctggattcatcacaattattttcatgggactattcgcatttatgaatgttccagggctacaagtgtatgttgttatattagctgagaggtttgtacctagcgctgttgatgtagcatcggcgattaacattgcagcatttaacgcaggaattgctcttggtgcttacttgggcggtattgtaacgaactcgttaggattaattcatacggcttgggtaggtggaattatggtagtaggtgctgttgttttaactgcgtggagtatgacattagaaaaaagagatcaagtaaaataaaaggagagaaaataaaatgaaaaacttacaaagtaaaacagtattaaataatggtgtagaaatgccttggttcggtttaggtgtatttaaagtagaggatggaccagaacttgtagaagcagtgaaatcggcgattaaagcaggataccgcagcattgatacagctgcaatttacggaaatgaaaaagctgtaggtgaaggaattcgcgcgggtataaaagaagcaggcatttctcgtgaagatttattcattacttcaaaagtgtggaattcggatcaaggatatgaaacgacacttgctgcatatgaagaaagcttaaaaaaattagagctggattatttagatttataccttgttcattggcctgtagaagggaaatataaagatacgtggagagcgttagaaacactttataacgaaaaacgcgtacgtgcaattggggtaagtaatttccaaattcatcacttacaagatgtaatgaaagatgcagaaattaaaccaatgattaaccaagtagaataccaccctcgtttaacacaaaaagaattacaagctttctgtaaagaacaaggtattcaaatggaagcatggtcaccacttatgcaaggtcaattattagataacgaaaaattacaagaaattgctgagaaacacggtaaaacaacagcgcaagttattttacgttgggatcttcaaaatggagtaatcactattccaaaatcaacgaaagaacaccgcattattgcaaatgccgatatatttaatttcgaattaacgaaagaagatatggaaaaaatcgatgcgttaaatcaaaatcaccgcgttggtccagatcctgataacttcgatttctaagattaaagtaagaaagaagagtgcgtaaaagcactctttttttgtgcataaaaatagtttctaaataaatactacttagtattaagtttgtgataaggggctgtaaacatgaatataaagcaatcgttcaagattttagctatgtttttaagtgttttatttgtgttattcccgcttcaaaaagcatttgcagaagttatggaccatacaaagtatgaaatgaattggagttatagtaagtcaaagaagaaaccaattcgaacagagcttattaaaaccgcagatggcaaaattgctttttgcttaaatgtagatttgaaatctccaagcggtcaagatttaccggaaatggggaaagtggatattaacgtataccgtgtactattgaatggatatccacaaaagagtccacaagaattaggtgtttctgattggagagaagcacattacgcaacgcagcttgcagtgtggaatgcgttaaaacaaatcgatattaatgatttagatttccgcaataaaaatgtagagaaagtaacgaaagacatcgttgcaaaagcaagcgctagtgaagagttacaagaaattacgatgagtgtaactcctacagaagaacaagaagcagtattaaaaaatgatttctttgaaacaggtttatatacagtagaaacaaatgcaaaaagcggaacgtataaagtacaagcaacaggtgcaccagcgggcgtgaaatttgcaaatgaaaaaggcgaaacaaaaacagaatttaatgtaggagaaaagttccgcattttaattccaaaacaaacaccagctggtggatttagctttaaagtatcaggaaatttaacgaaattacaagggattgcgcataaaggtacatcgactattcaaaatgcagtagtattacttgagcgtagtgaagaaaaaacaagtccagagttagcggtaagttggaaaaaggctgaggctccaaataaaccaaataagccatatactccaaatgaaccgcataaaccgaatcaaaagagataatgaaaaagcattggcgtatgccaatgcttttttatatgaattctttaaaggtatatcaagataataattaatcgagtgaaacactattttaacgttttaaaaagtatttaaaaataataaaatgtgacaaaatctaaacgttgcaataaatagattttattcacgaaattgtaacattattctaattagagaggctatcaaacaaagtgtaaagcgtgtaaaattcatttggaaaaactacctatagatggtcatatatgaagaaaatgtaagtttttattgttatttttagatgtatagatgacaatactgaaaaatatcttttactattctcttttttatgtagcaagagaactcatcacaaatagagagaagtgaggagggcatattacatataaattttacaatgtaagaaagcgaatgcatggagagaaatgcggtagtaatatatacaggtgcgcgaggtgttagtccattcatcaaatgtttttataggaataataggattacttattagatgaatatatagggtagtttatctaaataaaggaacaggggacacagattatgtcgaagaaaaagacgagtagggtattagtagctggaatatgtatatctacattattatcgccagtagctttcgaagcatcgaaaggatatgcagcacctttggaagaaaataaaggtgggaaattagaagaggtaaaagagaataagtttgagcagagagtatttcagttgccggggaaaggtagcgtagaagaaaataatcgtttaagagttacttggaaactttccgctaatgaaccgactggaatttatgcagagccaaatgaagagattacaattgacataaaaggaacgcagtctatccaagcttttattggaacgagatcttatgatgaaaaggacccagaggagtttaatttaaaaccagggaaaaatgttatttcatcttcaagaggcggtattttatatttttataatatgaataacgaaggagaagtaacagcttccgttacaaatggtggtagtcactttcctttatttattttaggtaagcatacaaaaaaagattgggatgaaatgttaaaaaaatataaggatccttatgcagttgaattaaaaggtgagagaagcttaattactactacttacgattctgtgcagaaatatatgaagaatacggatccaacagatttaatgaaattgcatgataagattatccgtttagaaaacgcagtggcaggattatctgaggacagtgttgggtttgcaaaatctccaactcattatgttcagtttgttgaaaaacggaagcctgctaaaggggactttatgtttgcaaaacattatcatacaggatatattccaactgcaatgaatagagttttagatatagaggtacttgagaaggatggatggggaccgtggcatgaagttggtcatttacatcagcaagaaccgtggaagtggtctaaagtaagggaagtaacagtaaatatttactcattagctgttcaaaaggcgttagggaatcaattagaaatggatgagcactataaaaactcatttgagtatttagagaagcctaaagcagaaagattcattgatgacattaatcctcttacaatgttttggcaattaaatgtagtgtatggagaacatttttatcctaggttacatcaagcttatcgtttgttacctcagagtgaaatgcctcattctgatgaagagaaaaagcagctatttatttatatgacatcgcaagtggcagggcaaaatttaattcctttctttgaggaatggggattaacaccaaatgatgatattagagagaaaatagaaaaatcaaagttacctaaattagaaaaggaaatctggaaagctacagatagtaatgatattcgtgagaagcaagttgaaccgtataaggttccatatggtgaacctgctaatgaagtacaaaatcttttagttggtacagattctgacgagaatgaagcaagtaaacttgttcgaaatttaggtgagaatgtaaaagtaacaggaaagattgtatggcctaaactagagaatggtaaacaggaagtgttagtagaaattggggatgagaaaggaaataaaaattcaattcctgtccaagttaacggattttatgatgacagtatagtttttcaaggactttcagatgatgtaatgtcgacagtgacacttcaccacaataagaagaaattaaatgtaaactttactaataatgaaatacattaccgttttgaaaaagaagaatatatgggcttaacgctatatgatcgaaatgggattgaaaagaaacgtgtatctgcagaaggacaagaaacgggaaaaagatttgcgatggaactaaatgaattggattttgaatatggtgatgtagtaaaagtattccatgcagaaccggatcgtctgaagttgtaccaaaataatacacttgtagatcaagggaaggctaaaaataaaaaagagaaattattccaaatcactgagcaagggttcgaattaaaagagagtttacaagaagtgacggcgaaaccgcaaaaagtagtagtcggaatggatgtagacaaactagatccgaaagaatttgtacaagtaaaagatggagaagtggttggttttgcagaaaaaccaaatacatcaaaaatcggagaacaaaaagtaaaagtagaaacgaaagatcgatttggaaataagaaagtgacagaagttcctctaacagtaacatatggagatagcctacttgtatatgggctgagctatagagatggtgacttaaaatcaattgtaactttacatcatgatacgaaaaaactgagtgcgacagatacaaagaacctaattcatgattactttaaagatgaaaagtattttgaattcacattgtacgataaagaaggaagagtgaagaaaaatatagcagtaaaaggtttagagaatacgcaagaatttgctaaggaggtaaatggaattgcatttgagtatggagatgtagtgaaagtatatcatgcggaatcttctcgtttacattggtatcaaaaagatgtatatgtgggcgaaggaaaaagtaaagagataaaggaattagtcttcaaaataactgaaaatggatttgaaagattagacggtgagcaaacagtaaaagcaaatccgcagcaagtagtaatcggaacaaatagcgaaacgctagacgcgaagaactttgttgaagtacagggtggagaagtagtaggttttgtagggaaaatagatacgacaaaaattggtcagcaaacagtaaaagtagaaacgaaagatcgatttggaaataagaaagtgacggaagttcctgtagaggtgacatatggggatagtctagtctatcaaggtgtgtccgatgttacacgttcaattattacgttaaaccacgctgaaaagaaattacatgcaacatttacaaatgatgagattcattatcgctttgtaaatgaacagtatataggccttacgatttatgatcaaaatggaactgagaaaaagcatgtaaccgcagaaggacaagaaacttcgcagaattttgcagaacaagtaaatggtatggcgttcgagtatggtgacgtattgaaagtgtatcatgccgagtcagatcgtttaagttggtataaaaagagtgagttagttggaaaaggagataagaaaaagtttaaagaaatttcctttaagattactccaaatggtttagagcaagtgcaataataagaaaaagctcgtaaaacattatgttttacgagctttttttattattcagcttcagaaactactgtgaagcgttcgtttacatgttttgggttttcaatctcatcaagtgctgcaactgcgaagtcttcgtaacttacgtagctatcaccttttgagttaacaagaagattgtctttgccagctttgtaagaaccagtgcgttttcctaatgcgaatagtgcagaagggctgatgaatgtccaagtgatatcatttgtttgttgtaaaatttctaagtttttaccttggttttgagctgttgcaagatattctttcgggaaacctggtgtctcaaatacacgtgttgttttctctttgtctacaaataagcttccagcgcctccaactacaagtaattttgtatttggtgcacctttcatagcttcaataagtacgtttcctgcatctacgtgaaggtgttcttcgcctgctggagcaccgaatgcatttacaactacgtcaaatgcctgcaggtcgttagatgtaagagagaatacatctttctctaaaacttttacgttttcttctgtaatttttgcagcgtttcttacgattgcagttacttcatgtccgcgattcaatgcttcttttaaaatacgacttcctgctttaccagttgctccgataattccgattttcataataaatccctccaaagtgttttgttaaagtgtatatctgaaagtaaatgaatttgttgtaattaggtttgttacaaactgttgtaatcattatagttacgggttggtatttttgtcaatagggttgtttgtgaatttattttttgttttagtatgtacagttagagggagggtagtcagtcataaagatattgttactgtgaacctggctaatatttggaaattgcaaattgtcgaaaaatgttgatttttgaatgttttttaaatataattcgttttatggagaaaaggaggggttaattgtatgaatattttagagcaatttatttcatcaacaaatacaattctttggtcatatattcttattgcaatgttaattggtttaggtctttatttttctattaaattgaaattcgtacaaattactcatttaggggaaatggttcgtttaatgagtgatggactaactggaaagacacgtaaaaagggtagcgtgtcatcgttccaagcattttgtatgagttctgcagctcgtattggtatcgggaacttagctggtgtagcgttagctatttctatgggaggacctggagctgtattttggatgtgggttattgcgattatcggggcttcttcaagtttcgtagaaagtacgcttgcacaaatttataaaataaaagatggcagtggcttccgtggtggtcctgcttattatatggaaaaaggtttaaataaacgttggatggggatttggttctctattctgattacaattagttacggtttaattttcaactcagtacaagcaaacacagttacattagcgtttaaaaatgcatttggtattgagcgttacgttgttgggattgtattagcagtattagttgcggttattatttttggtggtgtaaaaagtattgcacgtatgtcggaaatgattgttccgccaatggcaattctttatattgcggtagcgattttcgttgttattaaaaacttctatttactaccagatgtgtttacagaaatctttaaaggtgcatttggtttagattcagctgtaggcggtggtatcggtgctgcgatgaaatatggtattcagcgcggattatttgcgaacgaagcaggtatgggtagtgcgccgaacgcggcagcaacagctgatgtaacgcatccagccaaacaaggttttattcaaacaatcggggttttagtagatacattcttagtatgtacatcaacagcatttatcgtactatgttctggtgcatataaagcaacgaatttagaaggtattgaactaacacaaaatgcattaagctcacaaattggcccatgggcgagcagtttcttagcgattattattttcttattcgctttcagttcacttctaggaaactactactatggtgaaacaaatattgaatttattaagcaaagcaaaacgtggttaacaatttaccgtattgcggtagttggaatggtattattcggttctgttgcgacgcttcaagttgtatggaatatggcagacttatttatgggtctaatggtaataacgaacttaattgcgattacacttcttggccgatttgcgtacgcggcattaacagactatgtaaggcaaaagaaacaagggaaagatccagtcttcagtgcagattctattcctggtttaacgaatacagagtgctgggataagccagtggtaacagataaagaaaaagcagtgtaattgaaaaggcgagcatcgaggtaaatttgatgctcgccttttttgttgtagtaaatgatgaaaagggtgaggggtaattattaatataacttttttgtttgttcctctcgttatttgtggggaacgtactgttttaaaagtatggctgggcgaagaggataagagattgagtattggataaatgcatgtaatagctatatttttatgaaaaaaacaagtatgttaatatagttaacgtattcatgtcatgaaacctaacataaagttcttgattactaaaagtttttagaatataattttcttattgttaggaagagggggcaatgcaaatatggattttttagctagggtaattggggatgtaaataatatcctttggtcatatgtcattattgcgatgttaattgggttagggctctatttttcatttcgtgtgaaatttgtccaagttcgttacttcggtgaaatgattcgattacttggggatggagcaagctcgaaaacgagaaaagcgcaaaaagagaagagtggcgtatcatcattccaagcattttgtatgagtacagcttctcgtgtaggtactggtaacttagctggtgtagctatcgcaatttcagcgggtggtccaggagcagtattttggatgtggttaatcgcggtaattgggggtgcttctgcatttgtagagagcacattagcgcaaatttataaagtgaaagatgggaatgcattccgtgggggcccagcgtattatatggaaaagggtttaaataaacgctggttaggtgttgtgttctctgttctaataacagtaagtttcggattgatttttaatgctgtacagtctaatactgtagcggcagcttttgatggggcattcaaaacagatagtagattagtcggtcttgttatggctggtttacttgcagttattattttcggtggagtaaaacgaattgcacgcgcggttgaaatgattgttccagtaatggcaattatttatgtagcagtggcattattcgttgtcgtaacaaacattacggcaattccgtatgtatttaaagagattttcttacatgctttcggaattaaagaagtagtaggtgggggactaggagccgcgattttactaggggtaaaacgcggattattctcaaatgaagcaggtatggggagtgcgccgaacgcagcagcgactgcgaacgtaacgcacccagttaaacaaggttttattcaaactttaggggtatttacagatacattattaatttgtagttgtacagcatttattattcttttatcagatgtgcataatgcagctgatttaaatggaattcaattaacgcagcaggcgttaagtcaacatatcggtccatgggcttctatatttgtagcagttgcaatcttcttgtttgcattcagttcattagtaggtaactactactatggtgaaacaaatattgaattcttaaatggaagtaaagtgctattaacagcgtaccgcattgctgtacttggtatggttatgttaggatctgtagcgacaattcaaatcgtttgggatgtagcagatttattcatgggtattatggctgttattaacttagtggcgattgtattcctctctaagtatgcttttgcggcattatcagattacgtaaatcaaaagaaacaagggaaagatccggtattctatgcggattctattccaggtttgaaaaatacagagtgctgggataagtcagcagtagctgataaagaaaaagcagtataatgaggtgagcatcaagtgaaacttgatgctcattttttgttttatccagttgtttatagatggtaaaagacgaacatttatgagcatttcataattaaatgtaattttttaaagaaaagtgcggatatgagttgtgatttatgttagaatggaaaatgcctttgaaacaagagtttttatgacatttcctatccaatcgaaggttacggaggagaaatggaaagttcggattatttcttgttttgaatggtcagacgttcaacgttaatgaagagttaaatggaggattttattaatgaagtttgttatgttccttgtaggattactcgttgtatttgtactcggttttcttataagtgccgatcgaaagaagattaagtataaaccaatcgcaattatgcttattattcagctagcattatcttatttcttattaaatacgcaagttggttatattttagtaaaaggaatttcagatggatttggcgcacttcttggatatgcggaagctggaatcgttttcgtatttggtggtcttgttaataaaggagaggtttcattcttcttaacagcgctattaccaatcgtattctttgcggttttaatcggaattctgcaacactttaaaattttaccgatatttattcgtgctattggtacgttgttaagtaaagtaaatggtctaggaaaactagaatcatataatgcagtagcagctgccattgttggacaagcagaagtatttattacagtaaaagatcaattaagtaaaatcccaaaacatcgtttatatacattatgtgcatcttctatgtcgacagtgtcgatgtcaatcgttggttcttatatgaaaatgatcgaaccgaaatatgtagtaacagcacttgtattaaatttatttagtggtttcattatcattcatattattaacccgtacgatattacagaagaagaagatacactgaaattagaaaataagaaaaaacaatcattctttgaaatgctaagcgagtacattatgcttggtttcacgattgcgattacagtagcagctatgttacttggttttgtagcattaattacagcaattaatagcttgtttgattcaatgttcggtattacattccaagctattttaggatatattttctcaccattagcattcgtaatgggtatcccggtgcgacacgtttctctataagtagttgaactacgaaaagagaacataaatcaggttcaatccttagtagctgcttaatatatttgtctaattttttgggttcagttcattactggcagtccttttttggtagttttagaaattaaattataacatattaatatacgaattataaatatacttttacaaaagatactataagttttttataattcttgatttctcaatttccattgcatactgaattttcctgtaagtattaataactaccattaaaattatcaatccactagattattagaaaaaactggttatctacataattgtttggtaaaatatagatataatttaagagggtaaagttaatatagatcaactaagtaatgctaagaaaatgttttattgcataaaaaaggctccattgctggagcactcaaaataaacaaacgaattaaaacaagaaacagacaatttaactatatagataaaacataaataaatctatatatatgtaaaaatgcatataaaaactctatttattgatgctataataggtttactcgatgattgttatatttttttatggtttttaagcaataaataccttcttaacaccaagtgtacaagaaaagaagacatcttaagtgatgtcttcttttcttatataataacaacacaataaaattaagatggttcaagtgggaggaaggcacctttgggtatcttttctttgtcgaatttgcctaataggtgcagcaccacattgctatcaagttaaaaattttttcacccaaaacaaaaaaacgagctgaattcacataaataactatggaagaaaacaaaaacttaggattaaagaacttgtgatgtatggctatattggctgtttttattcagaaggatatattaatcctgagtatacatttgtatttaatcatgaggatatcgaagaaattatatttgtaggttttatagatgaggagaagaggcatttgtaggattgcttaattgaatatgatctagaaacagatgatcttcaaattccgataaaactagcaatctccacgccaaacttggacaaatcctaagcgggggaaaaacggacgcgaaaatgatgaagagattactattttcaaatcagttggtttggctgtagtagatattatcgttgcgaattatttgtatgagaaagtagtggagcgcgggatgggattgagttttgagggactgccttttggtggtcttttttgcataaaatcttgtaaagtaagaaaaagttgaatattaatattctaatattcaatagaaagataaaatgttttaaagttcaaaataatacattataatatatttagtaaaattaaccaatttatattttgctcattatgtattaaaggggaaatgaaaatggctggacaaattcgtatgtcaccagaggagcttaaatcgaaagcagctcaatatggacaaggtgcaaatcaaattgaggacattttaagtcaactacaaaatttacaaaatgaattaagaggagaatgggaaggtcgtgctttcgaaggttttgatcaacagttcaatcaattaaagccaaaagtacaaaacttcgcacagctattacaagaaattaatatgcagcttaataaaactgcagaagctgttgcttctcatgatgaagaattatcacgtaatttcggtttgaaataaaaattgttttactctatataacaagtatttcaaatgagccatacagcttatattgtatggctcatttgattgcatgcctagcgagtgatattgatagggatatatatttaatgagatttctttggtgcgtctggaaaacttatagaaagggtttgaaagaatgggacaatttcaaagtaatttacaaacagcaacgcaaattgctacgaaaatgggatcagcctctgataggattcaaagtgcaacaagtcgttctataacaaaagcgacgcgtacaacattatctgttaacttcaaagcacaagaagcgaatcagcaagttttagacttgacgaaacaattttccgctgcctttcaacaagcggttgataatattcattcggtatctaatgaatttgagagaatggataacgcacttcacaacacttttcgctaatgtgacaacctacgtaaagtaaaatagtaggaggaaaaagatgagccaagatattgaaaaacaaattaatcaagtaaatcaaaagttacgaaatgtatttgaagaacaggaccgaaatcaattcgcgattcacattcaggagcaagcggaagcagatttttatgaatggagaggtcgaaaccatcgtttgtttgatcgaattttaggaacttggcatggtgatagagaaatgtctcagttttttatgaatacatatcaagaggcacaacatattgaacgaaaagtcacatttgaattagaaaaccaaaaagaaacgttgcttaaagaaagacgaaaccttagtgatttagaaaacgacctttcctatcaacaacaacaattagcgagggaggtcaatgcatgagcttaaatatgtatttaggagaagtacaaggccaaactcaaagtatgaatgctgtatgtaacgctactattcaaggtatggaacaagtcattcagtcaattgatgcctttgcaattgatactgttctacaaggacaaacttatagcagtgcaaaatcattttttgtacaaacctttcgtcctttagcgcaaggaatcatttatctgtgtgaagagttaattcgccagaacgatgcttttccaagtcaatttcaatcacaagtcgcttccacagatgtaattgaacaagaaatattagaacaaattcgagaaattgaccgaatgaaagcaagtatggaagccatcagtcaagctatgccaatcccaggtatggaagctatggtaaatctttttactgtgatgaggcaaaaactgcaagaaaaactagaacatctatatgaatttaattatacttctagtagtaattatgatactgctctccaactagctgttagcattgcgacaggtttggcggaagttcaaagtgggaaagggtttagtcctgcaagtggtacatttagtacgcaagggttgaatatggaatggacaacttcaattcaagggattacagaagagagggcacgacaagctaccaattcaattgaagaaggtgaaatgtgtggtaagctacctgaaaaatctactggtgaaaaaatttgggacggtattgtagatggtacgggacaagcagttagcgatacaatagacggaataaaagctttaggagattgggaaacgtgggaaaacatggggaacgctgctttgcaccctattgataccctcagtacgatgtataatgtattgtcagattcatttattaatgatgtaataaatggagatgctgaaagtcgtgctaaatggggaagttatgctttaacacaagttggattaggatttattggtgataaaggattaagtaaagcaagtaaattaggtcaagcaggtaaagtgaccaaactagcaaaaaataagattccgcaagctgtttcacatattacaagtaatttacaaatgggagatcgctttgcttttgctggtggaaatagtttgcgatttagatttgatacgcctgattttaaaaaagctgaagaaaagctgtcgacctatcagtttgctagaggtgaaagtaattctggtgggagtaattttgttaatgaaaatcatagatcttcactttctaatagggaaattatatctaatttacaacatacagaaaaatttagaccaaatacactcaaacatatcctagagggtgaaataaattggcgtggtgacgcaatgggttatcatactgaagtattggagaatacacctggaaaaataattagcggaacagaagagatattaaatgatcaaggcatttataaagctagggtagaagtgaatggaacccctaaaactggaaatagaggattttctacatttttccctaaagattggagcccgcaaaagattgtagataatataaatgaagcatataataatagaacgtatgaatttggtaacacatattctggaataggttcagagggtataaggattagcatgtatatagatgggaatgggaaaattatctctgctttcccagcggaataaattttatctttagtataaaggagtacaatagtaatgaaatatccatatagctttgaagtacttaccaatggaaaactagttatgaggcttcctcaagaaattaaacttatggagacttttttaggcgttgaagtttctgcgtttggagattggattttagaagaaatacatagtgttttaaatgggaaagaaaattacgtagtagtaaatggaaacatttgtggtttagaaattcggaaagatacaactactgtcctagacaatttggctgaagatggtaagggagatttttgtgagatagaaacgattgaattagtagatttaattcatatttggcaagataaacaaaaagaatttaaaaaaggaaaaaataaagaattgaaataatagatagagctgacttcttatagaggtcagctctatctattatttcatatttctccattatctcaggttttaaagtcttttttcctaaataattatcagcaatagtcattgcaaaagaatctaaaggtatttagatatgatgatgggtggagagatagttcgcatgaattttggtgtaatccatttagtggattaagaattcgtttacaggaagagattgctattgtatctgattttatagaaaatttatatgaagtggatgaatatataaagattttagacgatgctgtagaagggaaatatctcgattttgaattagaatataatgctgcagtagtaaattctaatagtccgtggaaatggaggtagattagtggtggagaaaaattaacagctccccaaaaagctattattaggcaggttgctattgagaaaggtttaatacctgatgttcctatgaaattaggtacacaatatcctgattttaagaaagctggtttaattattaaatcggatgagttaccagaggaaatgtggttggcaagtgacaaacaacaatttaaatggttagatgccaggtaaaatggaattagtaccatttggaatacataatagcatatttcataaaggtgggcggagtgaaggacattggtcttatagatctaaaggtaggtaaagaaatggaggaattaaaatgaagattaaaaatggtagtgaacttcaatcaccaaatgatgaattaattgaatcatttgaggaatattgtgagataaaattaccaaatgattttatagattttttgaaaaaatataatggctctattccaattactaatgttttttcacatgaaaaaaacgaacttttaattgaacgtttcttatgtttgttggaggacccagaagatgatgatgaaaatggttggtatgatatagaggttgtattatctgatatcgatactcgtttaacggatgatgaagatttaacagggataaatgttattccatttgctgttttattcgcaggtgattttctttgtttagattttagagaaaaggaaataccatctgttgtggtatggtatcatgaagaatcagaagaattgaatccggtaactagtgaagttgcagataattttagtgagtttttaagtatgttaaaagaataatgtaagaaaaataattaaattttatttatgggtttgaatttttattaaagtttttttgcttttaatattttaattaaaaaagaagactaatatttgctttttaataggttgatatatattttaaagaaattaaaggagaaatgtatcaaggatattatccttttcttctttattgataccaatgtatttaagtgtaaattgtgggcgatatagattgttataaatcctaggaaacagcaattacaatacactctatttcgtggggtatttggcatcgtatgttcagtaggattattagttataacccaaaagtttgcatatggaatgttaggattacaaactcctatctattttattttttcggttggtttgtatatttttgctttgcattattattataaaaatcatattaaaaaacttcaggaatcaatcaaaaaatcaaaatcatcgaaaaaaaactctagttttggagtagtggcttttgtaggattgggtcaactcattgctaatatcagtcttggttttgcaacacaaaagatggtagcaattgtattaatgtgtgtatactccatgctttcgtttatgttgtttcatttcattatggaactccataggtactattatttaaggaagcatatagaagatgggggtagaacacatgaaaccatttaaagagtctgtattgaattttaagtatataatcgtggttctcctatagtcagtaaagaatgcggaaaagaaaagggagaagcaacatcatgaatatagaattacatttagataaagcaaggatagggaattatgcaattttttaaagaaaagtttttaccaaatggctctattgttctcttaaaaggagggacaaaaaaggttgtaatttacggaagaaaacaactacttatggttgaagaacctgtataactacataggctgtttttattcagaaggattataaaactaatccacttaacgagggtagaacagctcctaagattgttgacaagggtacttttgataaaaatgaatttgaaggtattgcatacgaattacctgaccccactagtcggtggttagtagaatatggacgaaatgctaaacttattaagtaagagaggagaacgagttaaatgattaagcctttatacgccgaaaatattatagtgggtgtaaaatataaaaataagctcaattggtatataactgaatcagatttatggtgtttagattataatcaagctggttatcctcctagtgaatatccagaagaaagaaaaggcattagtattttaaatgagactacaatagctaactttttagaaagaatagaaaaatataaaagatttacagaagatattaggttagaatttttaagagaactaagaactaatagagaagaagcctattatgattataatccatgtttcctaatagattttgagcgtttaactttttattctaattatccggaatcaatatcttttgaagaatatattccgaataactggagaggttatttacagcgatttgatgaacaagtaccctatgaatatagatactgggaagataagaataaaagctatttagttagagaggattaggtcattgaagaaaataaattaattatgataaaagaaacatttaagaatgaagaaattggtggtgtaaaagtagcagctattgcagctggatcggggcagttaattgctaatataattcttagcattgcaacacaacagatgggtgcgattgtatttatgtgtgcatgcacagtgttttcgtttggtttgttttatatgattatagaactccataagtattattatttacggaagcatatagaagatggagggaaaatacgtataggcttttaaagagaatttgttgcatttcaagtatataatcgcattcttcttatggaagccattcacgaggcttatagcaataaaagatgtataagtggaagattatattgtggtaaaacatctgaaggaatggaaattaggtttgttcttattaatgataagattatagctgtttatcccgtgtattaaagaatgtgaggtactcaaaaatgaaagtaactaatcagcccatagttaaaaatgtaagaaaatatagaggtaattgctaagaagcactccccctaagtttcagatgaaattaaatgattgaatatttacatttaaataatcgactatttatgctttaatatttatatgtacataattgggataattagggatttaaatttaatatgttttaagaaaggggaatgttttttatatggaaactccagaaaatcaatttaaacgtgcgcttaatccttggttctccatttggacaaaaccacgtgatacaatgaaagaaatttttatatccaaaccaaagaatgtgtttttactcattttactaggctcattcgtacagactttagatcgagcatcttctaaaaatatggcggattcaataagtagtccagtttcattaatctcaatggttatattcggtaccttcgttgccttcttaatttattattttttgttaccagcgttatttaattgggtggcaaaaaaacttggtggacaaggtacctttgagaaaacacgttactcagttgcctattcttatatcccttacgtttactctcttatattagtttgggtgccttcatttttcttgtttgggatagaaaactttacgagtgagacaccgaaaatggagagtagcataactttaacgattttgtttcttatttttgccataattgatatagttattggaatttggacaatcattatttccttaaaatgtttaggagaagcacaccaattttcagcatggaaagcattattaacaataataatatcctttatgattatcattcttcctttggtaataatagtatttcttatagtaggggttacaatcctttaataatttatttgcttcttatgaacttagagatttaattgaggtttggggacaagcacaaaaaatgtataaaaataataactaaaaaattaacttttataaaaacatttaaactaaaatgcttcttaagcgtgggtccaatagctcacgctttttattttgggtgactataatatttattttttaaatatataatcatgctatttgttacggacaaaccttcaaagaatctattggtgctacagctaattgaaggcgtattaacaatttgagagtagttattgataagaatggaaatgtaatagctgtgttcctaaagaataagaaaagtttaacatgagtttattttttttattcggggaatatgggcgtaattggttatcgagaaaaaattcaggagaataaaattatgaaaaaaataaaccatgaattatttggtgaaattgttcacgatttatattggagcggacaacaaaagataactatttttgggcaggaaaaaatagtttctttaactattgatggagaagaagatgatttaattcctaaagttcaagaagaagcatataggaagttcattactgatataaacaaacttacaaaagaagctgaacaagcaatattcgagtattataaagaagaatatatggaatatagagatatggtaggtgatgaatctgctgataaaatagcgccgattataacaaccattcaagaactaggaaaattggtggaacctgttgggttaattatattaccagattttgaagatggaattagaagagttggattaatattcaattgtacctgggaagaggacggtgtcggggtgaaatttgaaaatgagcaagttgtagaagttggttatcaagacatcgttatttgaacttcaaattatgtgctgtcactatatcgaacagaagctgggtttgtaaaataacaatggaactacgtgttttttcgtcatacaaaaacctctacatataagtagaggtttttaaattatatcttaatgaattatgcttttttagataaagcaaatcgagttcagattaaagaaaaa
